United States Patent Application Publication US 2026/0258423 A1 - sequence listing, part 21

SEQ ID NO: 167803 - DNA, 46709983 bp, Homo sapiens (residues 23,354,997-25,023,210 of 46,709,983)
  source 1..46709983: mol_type = genomic DNA
accaagcaaggacaatcaggcagctcatgtttaagacccagactcccggctggcttacaagaaagggttttcaaagccgggggaaattttcaggagtgcagaagttacagtctaaattaatacacggagtttatacattggtttggcctaagaaaaggtgtgacatattgaagcagaagcttacaggtcttaggcaaatttgaagattttctgatttgcaattggttaaggaaaagaagctttgtttaaaaatttggggtcagcagaaaaagggttagctctggcttgtggatgtgacttcctccaggcccctcaggaagaacagtagaaaaaagaattgtgatcagagctcaatcctcagttctcccttatctgaggtctacatgtcaacaggtctttttgttgggggtccaggtttctgaaaaacaattcaagggcatatgttaagatattatctttagtttctataaggaaataacctcccacgattctaacttcctttgctattttttttttttttttttgagacagagtcttgctcttcttgcccaggctggagtgcaatggcaccatctcggctcactgcaacccccacctcttgggttcaagcaattctcctgcctcagccttccgagtagctgggattacaagtgcccaccaccactctcagctaatttttgaatttttagtagagacggggtttcaccatgtttgccaggctggtctcaaactcctgatctcaggtgattcacctgcctcagcctcccaaagtgctgggattacaggcgtgagccactgcacctggcatgctttgctgttttttaagctactattcctctatgtttatcaagttgctcatttactttgcagagctagctagatgcctggaatttcccttgatggaactaaagatttttctttattttcatgctggggggactgcagccctctaagacagttttttgctccatatcacttgcagttaaaggacagtggttcctggtttctcattagttgtcaactggagccatactcagatcctggagcccactcaccattctatgcaacaaggcgctctccagaggtgggattttgcttcaaggccaggtggatactctctgtagtctgctaatacagaatcttatacagtcatgcattgcttaacttaatgatgaggatatggtctgagaaatgcattgttaggtgattttataatgcaaacattgtagagtatactcaaacaaatttagatgggctaacatactatgcacctaggctatatggtaaagcttattgcttgtaagttactgtattaaataccgttactgtattgaatactgcagacaattgtaacaccgtggtaagtatttgtatatctaaacacagaaaaggtacaataaagttatggtattataatcttaaaagaccaccattgtatatgtggtcaatggttgaccaaaacgttgctatgccatgcatgactgtacaaggtaatgtaatcattgaattgaccatctgtaatataattaaaatatatttgctttgtctctgattcctggcaaagagatcctaaaacccttggaatttcctgagtgagaacagtatgttttgcatgttaatgagatgactctttgaaataagggctagataacttcaggatgggggctggagtcatcagttcaagaatgtgaaaaaccaacccagagattagagggttagaaattgttttctttttgttttgttttgttctcttctcgctctctcttttttttatatacatatatttttattttttagtcaaatggagtctctctctgttttccaggcaggagtgcaatgctgcaatcatagctcactgtagcttcaaacttctcagctcaagtgatcctcttacctcagccccctaagtagctgagactacaggggcacactcagctaatttctgtattcttctttttctttctttctttcttttttttttttttttgagatgaggtttcactatgttgtcagactggacttgaactcctagtaaccacaagtgatacttccacctcagcttcctgagtctctaggattataggcatgagccagggcaccaagctcaagggttagattatacctacttgaaactatgaaacttgtcatgaaaccacgaaaaaaaacaaaaacaaaactctaaatagaaagatttgggtaagcatgcaggttggtgaacacatttacctgctgggagtctgacacactccagctaccctggggagtgaagcttctgtgtgctcaggacccttctggatgtcaccttatgtaccacattattagtttgtttatttgcatcttttagagtaaagctgtaattattatagtgcctttctaagttttgtgtgttaatcaaacaaattgtcaaatctgagttcaggttttgaaaacacccaaatttgcagtaggcctggaagaagtacgggttccttggaattcctacttgccgcatctaagctgttggaagtcttgtggaactgagcttttaactagtagggtctatgctaactctgggtagttaatggcagaattgaattccattgtaatatactcgatttatgtcaacatttggaaaagtggatgttatatgagaaaaccaagcacaatctcatcacttttgctatataaagtaaccaaatcaaaggggtgaatattctttcatgtctttgggtctcacccacagcttatgggaatttgattttaccgagcttatacaacagattgaggggtagcataaaaactaccttagagttcttccaaccacagcaatgatgtcaggtacctagtgtctaaaataatacttgacatatgtccagtattgatttgcttcttgacagttaagttttttcattgggtttactgtgtatacaagctaaaaacttatttcaaaagatttaaaatattgaagtcattttaatgttaaataatagaagtagccaatatccattttttctttttttcagacgaagtctcactctgtcactcaggctggagtgcagtggtgtgatcacagctcactgcaacctccacctcctaggttcaagctattctcctgcctcagccgccagaatggctgggatgagaggtgctactaggaatgcttgttccccagtgccgtaaagaaataacacttgaacatacatttaatttcctcagcaaagccctttttttttttttttttttttttttttgctttctgtagacagggtacacttgccagcagttttgccacgagagtacaccaaacaaaggagacagggtcgtttataacctgacacgtcaaccctactgctgtatccagtttccattggctggaacgggacctcacattctgtatttgtcctgattggctagcaacttagaacttttagaagaggcaaaggcagaggagaacaaaggaaggaggaagtaacttgtggaatgctgagaaaggtaaaaacaccttcacataaggaagaggaacaagctatgacctaatacttgcttggaccagtataagcatgccagggcagatatttaggggaaattgtgggagctaagaacataaagcacattgatttctttattatggctagcacatatttaagaatattagcacaggtctttgaataaatttgcttcaaagagaagttactaattattcctaattagatggggaggaaagtctttgaagaggaacctctactttactttttatagtgcctatcaccgcacctgggtaatttttgtatttttagtagagatgcactttcaccacgctggccaggctgttctcgaattcctgacctcaagtgatccacccacctcggtctcccaaagttctgggattataagcatgagccaccatgcctggccaatgtccatgtttagattgataaagtccttcctctatgtcacattttagacgttggttctataaaggtgataaaagaatcatctagctgtttatgaaatcattttggaattttatagttgagaaatgctttgtttctataagctgtcaacttgtaaacataaggaccagaaaatatcatggataaatttcaaatgcctattttctgtatgtattagtttgttctcacactttcaataacgacataccagagactggataatttataaaggaaaggtttaattgactcagagttcagcatggctgaggaagcctcaggaaacttacactcatggcagaaagggaagcaaacatgtccttcttcacatggtggcaggagagagaagaatgagtgcccagtgaagggggaagccccttataaaaccatcagatctcgtgagaacttactatcatgagaacagaatgggggaaactgcctccatgattcaattatttcaatctggtcctcccacaaaatgtggagaaaatgggaactacagttccaggtgagatttgggtggggacacagccaaaccatataattctgccctggacatgcccaaatctcatgtcctcacatttcaaaagataattacacccttctaacactcccccaacgtcttaactcattccagcattaactcagaagtccaaatccaaaatttcatctgagacagagcaagtcccttcttcctatgagcttgcaaaatcaaaagcaagttagttactttctagatacaatgagggtacaggcatttggtaaatacacccatcccaaatgggagaagttggtcaaaacaaaggggctacaggacccataaagttccaaaatccaatagggcagtcattaaccattaaaggtcaaaatgatctcctttgacaccatgtctcacatctaaggcatgctgatgcaagaggtgggctcccacagccttgggctgttctgcttctgtggctttgcagggtccagcaccactccaggctgctttcatagctgacattgagtgtcagcagctttttgaggtgcatggtgagagctgtcagttgatctaccattctggggtctaaaagacggtggccctcttctcacagctccactaggcgttcctcactggggaaactttatggggactccaacctaacatttcccttccacactgccctggcagaggttctccatgggggccctgtacctgcagcaaatctctgcctgaacatccaggcatttccatatatcctctgaaatctaggcagaggttcccaaatctcaattcttgtattctgcacacccacaggctcaataacatgtggaagctgccaaggattggagcttgcaccctctgaagtaacagcctgagctgtaccttggccccttttagccatgactggagctgaagcagcgggggtgcagggcaccatatcctgaggctgcatagagaagagagccctccaaaacagttttctctcctaggcctttgggcctgtgatggagggactgccatgaaggtctcttacacaccctggaaacattttccccattgtcttggtgattaatatttgactcctaagtatttatgcagatttctgcagcaggcttgaatttctgtcaagaaaaaatgggtttttcttttctattacattgtcaggctgcaactttttcaaactcttatgctctgctttctcttgaacactttgctgcttagaaacttattccaccagataccccaaatcatctctctcaagtttaaagttccacagatctctggggcaagggcaaaatgctgtcagtccctttgcatagcaagagtgacttttactccagttccccacaagttccccatctccatctgagactgcctcagcctggatttcattgcccgtatcactatcagcgttttggtcaaagccattcaacaagtttctaggaaattccaaagtttcccacatcttcctgtcttctgagccctccaagtctctgggaatttccatacttccccacattttcctgtctttttctgaggcctccaaactgttccagcctctgcccgttacccagttccaaatttacctccacatttttgagtatctttatagtagcaccccattcttggtaacaatgtactgtattaggccattctcttggtgcttaaaaacatacttgagactgggcaatttataaagggtagaagtttaattgactcacacttccacatggttagggaagccacaggaaacttacaattatggtggatggggaaacaaacatgtccttcttcacatggtggcaggagagagaagaatgagtacccagtgaagcaggaagccccttataaagccatcaggtctcatgagaactaactcactatcatgagaacaggatggggaaaactgctctgattatttaattattttcacctggtccctcccataacacgtggggataataggaaccataactcaagatgagatttgggtggggacacagccaaaccatatcactatactacgcaaattctcctcttctagttattgttgtatttcaaagacctcagaaagtctatgggttggaaggtgtgtcattttgttttcctttttaaggtaaatcaaacagctactgaggcactatttacctgaaatggagcagcctttgcatgcagtctcaacttcaaagttaacaaagaaatataaattttaaaagccctcaaagatggatatttaactattaaataaacatgtttaatagttatcatgggggaaaattcacattatgtattatatgtgtaatacataaacacacacactatatataatttcctttttattgtcattattttctggtcaagcaatcttctatcctctttttaaaacaccacaaggtaatgattgataatttgggagagaacaccactgagtgtttttcaggttgtgaatcagctttaaacctaaggtactactctgaacacgtggccactgaccctggggcttaaccataactcaacttttgctgagcttcaaacactagttctagtgacaaatggaacaaattctacaaactgcttcacacaaataatgcttttggattgcttgttgtgctcacttgcagagctgagagaaccatttttcttctaatccttatggacaaaaatgcattagtctttccacttctaatccaatccgtgccatattttctcttgtgagtaaatggttttgtggagtctctgttggtcgttataacccctgccttatgaaagcttctgttctattcagaacttctttattcttctgtaaccttcaatatagcactttgtctgtctgtaaataacagttagatagttcaggataaagatgtcttaatcttatcattacttgactttatatagctatgtaaacaaaatgtaatatgtgcataactatatataaaacataaaatttcaaggatgttaaaaacagatataatatgtaaataaaataaatatcataatttttaagaagaaacatagtatatgctttaaagatggactactaggcaatttgactcctgcctgtgtccatacacttaacagttataaaatgtatcctcactgaaaaccttcacttagcactgcatttatcaaaccctatgtactttcaaaatttataccaattaacaccctacaaaatagttattactattaatgtcattttacagatgaaaaagctgagatactgagtgactttaaacataagctataacatcataaaatttcaatttctccatttgcatagaatatgtgtgtttaacaaaacttttcaatatatctatattttacatgacattttaaaattcgtggaaagcaagttctaataaattacaatgtgcataatattgtcttgatcatggtttgtgctcaaagtaagtggttatttaaggaattcaagtagaaaatgtatagctgtgtttaaggactgtgaaagattagaaagtttttaccctacgagaaatctaagtaggtatcttttcaaaattgtatgaattacagtagaagataaaagactcctgaatcagatacaaagaagagttttttattatcaacaatcagcatagctagagtactggcatttctgcaccagtttctgagacccagttttcacagggtaatgtgaagagggatagttaaacctgcataagcggtaagcttccttactgcagaaaaatcccgagtttatgtatgcccattatttttaactgttcagttagaatgtttattttttgctcttcaaaagtagatactctatattttctaaggctcttatacaaacacttttaaaaacacagtttggaaaaaggtacaaatgtgtcctcatttgtaagataatgcataaatgtaagaaaccaccaagaatttgctccctaacattctttttaaaattatttaccctatactgcactgatttgggtagtgcatattttttagacagccaaatatttttattagttttcaaagtagatgtctcctagtcactacctacctgtgaacccgtctctacagtagtagaagtatgaatggtacatctattcaaacaagagaaattacataaaaaactacattggttggatatcttgtgtgtcattctccaggtcccatgctggttttaagcataaccatatcagcttaatataaaaccatggacttcctaaaattagagaacttaaaacaacggagatgaagctacatgaaagagaccctggattattaaccatgtggagctttaatgaaggttcgatagaaaacaactattggtaaaagcctaagtcaacaggattgatacacaggttgtttacataagctatgtctactgtatatcaatccattgtcttgaaaacattatactcaaatgaatttagttgaaagaatatacttataagtttgtcatcgttaaggaaaccaacaacagatggcacaacacccagagactagtacccgtgttaatccactactccccttaggtctagagtatcaaaataaatgaggtagataacattgcagccctgtatttttcatctttcatggtttcaccaccttttcctatgttactaggcagttcatcttaatagaaaagtagggtctaccttccaggcctttgatttttagtttggccatgtgatttgctttgaccagttgttagcccatgtgatgcatgcagaaatccaacaacacatttgagtgtttgaacttccagatttgctcttctgccatcactgtgagagtattcctgagccagccagctggagggaaaaacaggaggagcagggctgagtcgcaccagtcatatacgtgtggccatcttgtatcatctttaatgctatttcatctaagtctgaaagtggagaagtcttgagaaaaggtaatggtgcaaagagagataagaaacatggaaactgagggaatctaaaaaggtaaacaagaattttgtcccaatagagattcttagttaaagacaatttgtatatttatgtccaatattttctcccatattgtcattactgaaaaattctgtatcatatcttagattcgaatattcaactgtttttgcttcaatctttgaaaaatggcatgccattaattggtcaattcaagttcttcacttaaggaaagtagaaaacagagaaagtgatttacaacttagttacaatcacaatcacaagatgacaggatcaatcagctgattctgtcatcttatcctgggtggtagcacttttcctgtgaggtcattatcttggaatcaacagtatctatttctgaattccaaagaataagataattaaatgtacatttaattcaaataaaagacaaactgtttttcaatcattgtttagtaaactaagtttctttgaatgaactatggtttatttttgttgaaatatgtacaaaggttaaatatgtgatgtttccatattaatcacctattattttgtaacttttctattataagaaataaggtcttgctattagttgtctatgcatttgaagtctatgcaacttccttctttaatattggacaggccgggcgcagtggctcacgtctgcaatcccagcacttttggaggccaaggcgcgaggtcaggagttcaagaccagcctggccaacacagtgaaaccccatctctactaaaaatacaaaaaattagccgggtatggtagcgggtacctgtaatcccagctactcaggaggctgaggcaggagaatagcttgaactgagaggcggaggtggcagtgagccgagatcgcgccactgcactccagcctcggcaacagtgcgagactccgtctcaaaaaacaaaacaaaaaaatactggacaaaagataatgtacaatagcagtcccttgatctcattttttaaataaaaaatggaagattgtagcttagctagggaaacagtataattgcaaggtagcaagtgtgtcagctcagccttcacattctctggtcatagaatacagattgccaaattttacatttaatctgggaatgtaccttgaacaattgtgaacaactatctgtgaacgtgtcttgcagacaaacccctttattcaagggaaactagtctactggcctgtgtccataatttgattgattttgctcctctgtttctccagacctacacagatgttctatttcttcactgtttaaaagtcttttttgttggactccacatttctgtgattgtaatgggaaatacagctgtcttctggttcaacccctcagactctaatcatagttttaatgatgaaaatataagtaaccaaattacatatataggtaaccaaatggttaccaacatgtaaccattattggtgctattgtgaaaatcacatgtcaaaataatttactttcacttcaaaatactccatagacagagtaatttgaaaagtaagtctattttgttataatgagtcagccacaaataatgagttagcttagcactaaaaaatgggataatcttgattacattccttccatagtgtagtgtatgcatctgtatgtatattgttcgttttcttcatactttttgtgtcataagcacaagggacaataggaatttgatgacttcatgacctgatctaagccattatgattatattgagccatgccttgcaaaaattaatgttgaaaaatgagatcatttatgagatgaaactacgatgtagctttgaaaatataaagcaattttataagttcagtatagtttttaaaaagtaatcttacactcaagagatctgaatctttctaattgtaaagtgagtaaaggagcaaaaataaaacatgttcacattcttttgaagaaacctccacaatagaccactgtatgtaatgattccttagccaaaggcaaatttcttcgaatttcttcctttggcctctacaatatacataacacatacacattgccagattttaaaaaaattagaaaggattaaaggaattaaataattaagttatttaaatatataaatatagcaacaaaggctatcatatcattataaactgaatattataaaatgaatattaaaagttaacacagttcctttttattttaaagtcacaagacacatacctagataacatgtgcatcaaaagaaattcaagatgaaatttataactctcaaaagtaatgaaaaccatgatggtttatgataaaactattggtaaaagccaaatttcactcagtttataaactaaagtgtcttcataatcaaacagaaaaattaaagtagttttatattcaaattaagatgttagagaaaaaaattcccaattagctataagtaatttagaaaatttaagtgaagatttaaagtaaaattaatagattagagaaatgaaggttaaaatatctatgaatgccatatttgccatattttgagcacccagtaattgtttctggttcctaatgaaataagagagttccctgacccccttgcaggacttgtgacaaaggtgtggctcctttgcttgtctgtcatttactcaaaccccttacagaagggggagcatgcagaggggcaggtgcaggagacagggagcaagcttctgggctctggccccactatagcatctaggggtgtattacaattaatgcccttttagcagttttgctgtccgaggatggctaggaattaaacctgctcagtggagagtccgggtgacagccttaacatcctgccctcttggtaccggggtccttgtctggcatccaggaagaatcaagtcactcggacttgaaggatggtgaatgcgaggattttattgagtggtggaagtggctctcagtgggatggatggggagctggagaggagatggagtgggaagatgatcttgcctggagttcagtcatcccacagctgagctcctctccaaccgtccccagccggactcctccctacgttcagacactcctcctcttctctccttctctggtgtgctgctctgccactctgctgctcctctactcctctgtttgtggagcttggggtttatatgggcacaggataagggtgtggcgggccagaactgtcttggaaaaggcaatatttgagcgtgaaaacaggaatgtctgttcccatttagggccacgggtttccaagcttgatggtggggtttttcctgggcaccacccttttctacccagtatttccctgcatcctgtctgtatcactaccatttccttttggtttttctcctttgtgtgtgtgtgtgtgtgtgtgtgtgtgtgtgtgtgtctccatgtttattctttccttttgtcctaattttttcctttttctaatcatgcaaactcctggaaaattacttaaaattgtaattcagggatgtgtcaaaataataaaaaaaattaacaatgtagtttgaggatgaaagtgtcagtgatgagaatgaaagttctgtaagcaccgaaattatttaaaatgaatgaggaaattcaagtataatatgtaattaagattattaccatctcactgaaagcgtttgtaatatgtaattatcaaaaaattaagaatagttactgggaaaaaatacagagcattacagagaaaaaaaatacaagatgcacataccctaaatttacacaatagaaaaatgaaaagaagaaattctacaaaatctaaaaaagaaaaaatgtttgggctttaattcatggaaacaaaagtaaataaagaacactttcgtgttgtattagtcttctagtgtttcataacagattgtcacaaagctaatggcttaaaacatgcatagttttttaaacttccatttccatttcacgatcaaaaacaagaggtcctctttgcagtcctctaaatagactctcttacagcatggtgagcttacttccccaaaggtaaagaggaagagtgtctctggtacaagaggtagctttgtgcatagatactgtaacctaagcacaggagcgacaccaatctccttcacagtattctattattagaaacaagtcacagactccttccacattgaagggcaaggacttatacagaccttgaatatggggacaactctaaggtctatccaatatacctagtaaataaatacccttggattgggttaaacaatccactactataaaattttctgaggattgacaaagaaatagtatttaaataaaagaagaaaaatgtgttctgatattgtgttagtaaaatagcattaaacacaaaaggcataaaaagggggcaaaaatcacgaagcaggctacacactgtgagactgaactggttgttagaaaaatagaagaatgtcagaaataaaacagggttcattttaactcatgaatttgaatctccatttatatgtcacttcctaaatattgtatcttgtatcacttgatcccctagcttttctatactttctagttcttctttttgatatgtccattatacatataattagttgattaatatttgtattctagccttaactgcagttccatgacaggaggtattcaaacagtcactattatccagaaatatatctagtatgtaacaaaagcttaataaatctttagcaaattaaaattaaaacaggctgggcgcagtggcttacgcctgtaatcccagcagttcgggaggccaaggacagcagatcacaaggtcaggagttcaagaccagcccggccaatatgatgaaaccctgtctctactaaaaatacaaaaattagccaggcgtggtggccggtgcctgtagtcccagctacttgggaggctgaggcagaagaatcacttgaacccaggaggcggaagtggtagtgggccaagatcacgccactgcactccagcctgggtgacaaaggtagactcagtctggggaaaaaaaaattaaacagattacagaataaaatacagtgacaggaaataattagaatatcaaaaaataagctattgagagtcttcttcttaataaacttagtactaatgaaaataaatattattgctataagtagaatttcagacatttttagtttaataaatataagaaaacaaaagaatttgaactatttcaggagagtttgattaaagctattatattaaagttaggctggaaatttcagatgttcaaacatgtattttttctttaatcaaggctatctagctgcatctactctattcaatatatatttgcacattcttaagatatcttcaattaagcttataaaaatatgaatttacatatgcagcatgatttacttttcaggattgatcttttaaaatttgtacaaatttaatatcttataaatattgcaattttttcgaacactgccaaaatataattgatatcatgaaatattcatttaaattactcaaatatgtcaacaggcaaaaatacatttagtaaccactacatgtatagagaataaaaattccagtttggatgtgatgttatatgtcagtatgtaaacccatgctttaaatagaccattttgttctttaaaaaaattatctgggccgggcgcggtggctcacgcctgtaatcccagcactttgggaggccgaggcgggcggatcacgaggtcaggagatcgagaccatcccggctaaaacggtgaaaccccgtctctactaaaaatacaaaaaattagccgggcgtagtggcgggcgcctgtagtcccagctactcgggaggctgaggcaggagaatggcgtgaacccgggaggcggagcttgcagtgagccgagattgcgccactgcactccagcctgggcgacagagcgagactccgtctcaaaaaaaaaaaaaaaaaaaaaaaaaattatctgtagttttctctgtggaaccgataatattagagataatttctcataacaggaaaaaggggaggaagtaaaaaggaagaaaagaaggacggaagaaattaaggaaaacaaaagggaaaaaagagataacaaaagaaagaaaaaacacaagtatcctacacaagtatacagctcattgtactctagtgagatgaatgaattatagatacaataacataataataatttttggtgtttatttgaaaagcaaatgctgcctttctctatatcagcttatgttggatatcttattatcctaatcaaaagtcagtataacagaagagtagaaaggactactgaaatgtgactgagataaaaattatttaaatgtaaataaataataattagggtgtagtgaatgaagaatgaggtgaatgaagaaaggagcattaaaaagaataaatatgggccaggcacggtggttcacgcctgtaatcccagcaccttgggaggctgaggcgggcggatcacaaggttaggagatcgagaccatcctggctaacatgatgaaaccccgtctctattaaaaatacaaaaaaaatagccgggcgtggtggcgggcacctgtagtcccagctacttgggaggctgaggcaggagaatggcgtgaacccgggaggcggagcttgcggtgaactgagatcgcaccagtgccctccagcctgggcgacagagcgagactctgcctcaaaaataaataaataaataaataaataataaaaaataaagaatgaaatatgatgaatataactcgttgaaatataactcgaattctcaaatagagttaatatagcaaaaaagtcaaaatacaatagcatgcataatagtttcaaattaagactaagttgattgaagacagtgaaagaaatgtggagagcagtaagagaaattaaagaataagagaaataaagcatgagggaaatgaaagcacagatcatgaaggaagaaatgaaaagggaagtaaaatacagcaatgacaataaaaatattaatgaagaaaatatgggtatgtcataatggaaaaaaaattagaaagaacaatctgaaaagtattgatgcctctgtaaggaagcgtgaaatggggagttggaatattgtaaacgtctttttatctccttcttgttacctaggctgagtgttgcagagtcctaactgagggcagttggcttccccaagaaagtgagacaccttggaaaggctgactctgacctgcagtgaccatatatcagttccatatgacagaatgtctccttccaatggatgttgatcaccttgtcacctgttgcctaaatgaccttgtctattgtccattattttgatgtatccagaggggcaacaaatcactctcctagctgcacaatcattctcctggtaaatgtattaggcttaccaaagaaacgtacaaaatcccatctgagaatggtcagttttccaagctgaactacatcatgaagtaaacctcaagatcaagaaagtgatcgaaattacttttttttttttttttttttttttttgagacggagtctccctctgttgcccaggctggagtgctgtggcgcggtcttagctaactgcaagctccgcctcctggattcacgccattctcctgcctcagcctcccaactccgctgatattaccacaggtcttgatataactcagcctttggaggcatcactcaggatggtaacagacatggctagccttggagatacttctcattttaaaatcgcttgccagcttttggaatggaacttataccatcagctctcctgactctcaggtcttcagaacaggctagaactatacattgtttctctagcttgtcaactgcagatcctgggaattctcagcctccataatcatatgagccaatgctttatcacgaataaatgcatgtgtgtgtttgtgtatatatatatttatttatatcctactagttatatttctttggagaaccctaatatatgctaatatattatggatgccaaaagacttctttcaaggcatgttatgttcaaatataaataaaaaatctttaaatatacctttacctttgatatcttgggaagttccttagatcagaagatgttttcttgaaagtcaaagtaattacacatcttgcaaatgctagatcatggttgatgcgtcagtctggataaagaaacttgcttgtctgttattaccaaaataaataaataaataaataaaaacctcagcatcttctgtcaggttataaatgtcaccttgtgataacattgcctgttcctttgcaggcacccttctgcatttatacattgtttcacacacaatacaaaatggcataggcctgattggattatcagctcatataaaataaaataatattttttactatatatagttaatacaatatattaataactagcacttcttttgtgtttcttttttctttgtccctttaatgtgctgaagtgattaaaaatattattacaatgtgtcatcaactttataagaattacttataatcctaggcctcaaattttccttttctgtatgacaatttccatgtaaaaatcccaaatataattgtaggacaaacttcattaaacaatacaataaatattcagaatgattcaatagtcaaatctcataacaacacagaaactttaccatacattttacctctgacttacataattcacactgataacaccaccaaatgtcattggaacagctgaactggaacacagaaaatgcttccttttgtgtaaaaatgcccttttctcttgcaccattttaatccgttcagttcattaagttagtcagcagcctataaaaagaggttggggtaagttattccagaaggagggagtaatatcagttccctgcaataccacattcagtaattatcaatggtcattactatctaaagtagaactgactcaatcaagtaaatatggtcatattgaatactgatatacagggctggaaaaccatgaatgaaattgctaatgggatttctcaatcgctgtcattgtgcactaatgtagaaatcaataactgatttattttatcatcttaccttttataatcctcagtgttacctcacagaattctgtttagataaatcttattgtagacttaaataacatatctaaaatttgagtatgattttaaatattctttctaattttcatttcacatatacaatataaatttaacaatttctcaaaatccttaataagaaaatgttgacacatcatatgttataataaattatgtaattacttctaatatctcatttattcaaatgaaaagtttaccctaaatgtggtcaatagaatcatggttctgtgattatgtgtttctgtaaaggaaaaaaaaagtttttctaattccatattttgaagaagtattcatggatgccacaatataatatttgaaatttgatttgaaataatcatcggggcattgaagtgacataaagcacaatttcaataaattgatactttctgaaggggttaaagaggttcacatataatttatctattttatagatattttgccatcacttcataataaaagcaaaaacaaacaaaacaaaaatgatgtggttagtttaccatccagtaaagaaacattatttctcagctaatgtctcaaactacaagatattgacattaaataataaaattttatacatctatttttccattttattagtagcaaactttttgttaaaaatctttaaaaaggcaatataagcaagtgcataaatatatatgctctccatgtagcaatttgtcactaaaatgtatcttcctagtagaatatatgttcaaaattaaaatactcttttgttttcacctttttaaccctgttttgaaaatgagttatgtaaaggtaactggaatggctaaactgtgtccccagcatttgtatgttgaaatcctcacctctagtatattagaatgtgactgtatttgaagatacggcctttaaagaggtaattaagttataatagggtcattagggtgggcgctaatataataagtctggtttccatacaagaggaggagattaggacacagacagcgaaacatcagaagtgcacacacagattatctgattacacagtgaagtctgccctctgcaagccaaggagagaggtctcaggcgaaaccaaatttgtcaccatcttgatcttagactttcagcctgcagaacaatgagaaaatcaatttctgttgtttaagccacacaacctggggtatttcattatgacatttagagcaaacaagcacagtaacttttcctaatttttttttctccttcacataatcaacttttctattaatatgtgtagttgtctgctaggactgccataacaaaatacctgagactaggtgatgtaaataacagaaatttatttttttacagttcttgaggctggaagtcaaagttaaggtatcagcaggtttattttctcctgaggtctctcttcttgaattgcagaaggcatctgccagatgtgtcctcagagggtcttttgtttgtgtgcgcatctctggtgtctctttctcttcctataaaaacactagtaatattgaatcagggcctcacccttaggacctcatttaagtttagttaccttgttaaaggccatatatctaaatatagtcactttaggttagggcttcaacttatgaatttgggagtcagcacaattgaatccacaaaatatgcatatgaaatgggtgctttatatgtttatttgattataaacatacatttttgtattcaggaaatgagagagggtcaaaaatttgcataaaatgcctgattattactattcctccaaaatctttttactgtattatgagtaaccattctgtagatagacttcattctactgtcatttcaaaatgcagtgccagcttttttaactctccctcaacataatatctgccttttataagattcaaaaccattaatatcatgcctttattatatgatggattattttgtagcccctctttctgacagtatccccccccaactcactatgaacatttttgttttttaactgtaaaaaaaaatcaagcatgaattttattgaaaagtgcctcccatttgagtctcatgggctgtgaaatatagtttggatacaaggacgaagataaatagttttcatttttagcctacagaaaataatttgttctgctctgggaactagtaaatctaaaaatcaccctgacataaattctctcttcttttaataacgaccatttaagtggatgggtgaattcctttggactccatgtgatttatcagaacaaatcttattaaaaatgtaattgttcagacaataatattagtcattcatttaggattaaacactgtatctaggacaggcttttaaaatgaaaacaaaatgtaaacatcattcataaataattgctgaatcttgaatatttattctctcaattattattatgtatatttctttgttctttaattttaaactgagagaatatgtttaattactctgtggaaaggtaggcctataaatttttagtgttgaagccttcttattataccctataattggcttgtttagtttaaaattgatgtgaaaataagatgctgccacgacaggtgtgtattaaaagtgaaatgactggtatccttgcattattaacattaactatactgatctaatcatattactaattcttacacatatttttacttatttattttacaacaatatgttcaaatcataaagacatagttaatatgactatatttaggaaaatacactaatataacttttaatcataaagttttgagtttttaatgactttagttaatgcttccatcatctctcaatttgaccactgcaaaactttatgagatccacatatatatgtcagtaatcaactttgccgccagaacatatttttaaataaatatctgattatgttgctgtctaatataaaactagtttttacttttcgtaaaacaataaaaatgaacttcatctgcctacccttcatcaggcattccctctgcctttctacacttctctttaacctgccattttaagttactcccattaacctcagtgtctttgcacagctgattactaacagaacatctacgtgtactttttccattcgtatcttaatattttcattccagatataatctgtacagattgtatattgtaatataaatgtcaattattcagagacattttgagacattttatttctttcccccaaacttccaggaacctcatagttctctcttcctttataatattatattcaaataaatgtttaatgtctatatcttccctagcttttaatttctatgaacataaggagtaagtctttttgttcacattatattccacatacataaaaattctaaaaatgggaggtcaaggcaggtggatcgtttgagctcaggagtctcagaccagcctgggcaatgtaataaaaccccatctctgcaaaagtacaaaagaaattagccaggcatgttggcgtgcacctgtagtcccagctacttgagaagctgaggtgggaggatcacccaagcctgggagctcaagactgaggtgagccgagccataatcatgccactgcactccagcacaggtgacagactaagaccttgtctaaaaaaaaaatcttaaaatattagttactcagtgaatgtttattaaacaaatgaataaaagcaagagaagaggatactttggaaacagcagactaagtgtttccaagatcggctcctccataaaattaatgtaatgagaacattagcaaaacattgaaaacaaatttaaaacaaactgttttcaagactctaaaattaactaaaaatttgcaaaatttcaggagcacttattcaagaaaaatagtgaatgtcaatgagaacagtgagctttttggtagcttacattgcctcatttccatcccactcctcatagcggtaccctcaaaagtcaataacctcagactggcacggaggctcacacctgtaatcccagcactttgggagtcagaggcgggagaatcacaaggtgaggagatggagacaatcttggctaacatggtgaaaccctgtctctattaaaaatacaaaaattagctgggtgtgctggcgcacacctgtaatctcagctacttgggctgcaacaggagaatcaattgaacctgggatgcagaggttgcagtgagccgagatcatgcctctgcaatccagcctggccacagagtgagaccccacatcaaaaataataataataataattccctcacaaccaatgtacttgtaaaaaccaccactgtagtaccacttagaggggtccaacaagtttggagctcctaaaagccccatgtccagaaaattctctttatctgactagactcacagtcctatcaatacaaatagccataaacccaggctgatatggtttggctctgtgtccccacccaaatttcatcttgaattgtaataatccccatgtgactagggcaggaccaggttgagataattgaatcattggggcagtttcccccatgctgatctcatgatagtgaatgagttcccatgagatctgatggttttataaggggctagccccgtcattcagcactcattctctctcctgctgccctgtcaagaggcaccttctgccgtgattataagtttcctgagaccttcccagccatacagaactgtgagtcaattaaacctcatttctttataaattacccagtcttgggcaattctttatagcagtgtgagcacagattaatacagtaaattgtaccaagggagtggggcactgctataaggatatctgaaaatcaggaagcaactttgcaactacaaaatgggcagaggttggaacaggttggacggctcagaagaagataaaaaaaagtgggaagatttggaacttcatagagacttggagggctccaaagacaggaagatatagaaaagtttggtacttcctagagacttattgagtggctttcactaaaatgctgataatgatatggacaatgaagtctaggctgaggtggtcttacatggagatgaggaacttgttgggaactagagtaaaagtcacttttgctatgcttaagcaaagtgactcatggctttttgcccctgcccttgagatctatggaactctgaacttgagagagagatgatttagggtatctgggagaagaaatttcgaagcagcaaagcattcaagaggtgacagagcataaaagtttggaaaatttgtaccttgacaatgtggtagaaaagaaaatctcattttctggggagaaattcaagctaactacagaaatttcataagtaatgaggagcaaaatgcccattgccaaaacaatggggaaaatgtcccagggcatgtcagagacctccgtggtagtgcctcccatcacaggccaagaggcccaggagggaaaaatggtttcctgggcaaggtccagagccccctgctgtgtgcagccacaggacttggtgccctgtgtcccagccacttcagcatggctaaaaggggccaaggtacagctcagcccattgcttccgagggtgcaagccccaagccttgtcagcgtccatgtggtattgatcctgggggtgcacagaagtcaagaattgaggcttaggaatctcctcctagatttcagaggatgtatggaaacacctggatgtccaggcagaagtttactgcaggatagggctctcatagataacctctgctagggcaatgtggaagggaagtgtggggttggagtcccactataaagtcttcattgggacactgcctagtggagttgtgagaggagggtcacagtcctccagacccagaatggtagataaactgaccccttgcactgtgtgcctagaaaagccacagatactcaatgacagcctgtgaaatcagcctggagtggtgctatatactgtaaagccacagagacagagctctccaaggccatgggagcctatctcttgcatcggtgcagcctggatgtgagatatagagccaacggagaccattttgaagctttaagatttggctgccctactggattttggacttgcatggagtctgtagcccttttgttttgtccaatttctcccatttgaaatgggtgtatttactcaatgtctgtaccaccattgtatctagcaagtaactaacttgcttttgattttacaggcttataggcagaagggacttgccttgtctcagatgagactttgaactcggacttttgggttaatgctgcaatgattaatactttggggaactgttagaagcacatgattgtgttttgaaatgtgaggacatgagatttgggaagggccaggtgcagaatagcatggttgggctctgtgagaagagggtcacagtcctccagaacccaaatctcacattgaattgtaataatccccatggtcaaggtgggatcaggtgaagataattgaataattggggtattttcccccatgctgttcttatcatgatagtgagtgaatttccatgagatctgatggttttataagtggctttccccttcacttggcactcattctctgattttaggtttcctgaggcttccccagccatgaagaactttgagtcaatcaaatctcttttctttataaattaccaagtcttgggtatttcctcatagcagattgagaacagactaaaagcaggcttttgtcaaaaataattaagtagcaattgtttaaatttgaagcttcctgaggcaccaacacatgcaatacaagctaaaggttaatcaaatgactaaaagcacagtgtggacaataagatgtccatagagggctttaaaaagttctgacatatttcagggaatctagaagttcacacccatttgtagggctgtgccaatccaagagaagaccaaaggagtgctaaatatctgacttctggctaactaacatttatgtctgcgtaagtaagaactgagggctaaaacaaagacaaacactgacatagagttgaaggtatgccttaacacacacacacagagtaccccggcaaaatctggtggatttactggttcaagacatttgagaaaacctctgctcactcattacctaaccactaagttaatcaagaaaagacttcagtggccacacacaacaaagcatacagagtttatggtccaggaaaaatcaccaaacaaacagcagcagaaacaacacgtagcaacaaatcctaggggggaaaatggtaatctgcttcccatataagcacaaatattttatagatgttcagctttcaacaaaagctataagacacgtaaaaaagaaaaaaaatatgaaagtaatgcccacatgcaggaaataaagaaaaatatttaatagaaactgttcccttgggcttggacaaaaataatgaataaaatcaaaaagaaaaaaaacaaaaattgttttcaatgaaacccagacattggaattactagaaaatgtttttaagtcagctatcataactatattaacagaataaagaaaaaccatacccaaaaaattaaaatataaaaacaatatctcactaaaaagaaaatacttagacataaaaattgtaaatgcacacaaaactgaaattctggcatggaaacatacaataactaaaatttaaaaattcactatagtggaataacaaaatactacacatggcaaaagaaagaatcagtgagcttaaagataggtcaattgagattattcattctgaaaaatagaaaaaatgaatgaataaaaataaccagagatttatagacctatgagacaccattaagcatgccaacataagcataaagggagttccagaaggagaagaaatacagaatatgtagtttttcatggctattatttatacagacttggtggcttaaaaacaacagaaatttgttctctcccacttttaaagatcaaaggtctgaaataatttcactaaagtgaaatcaatatgtcagcaggaaaacactccctgtggaggctccagaagataatcaattcctccctcttgctgcttctcgtggtttctggcattctttgagttctaactacatcactttaatctctgcctccattattctatttcttcctcctcttctggttctatcaactctccctctgcctctctcttataaggatactcgtccttgcatttaatacccacctctataatctaggataacattccatatcaaggtccttaattgtatccacaagtgctctcttttccttacaagataacatttaaaagtttcagggaggatgacctaattttgggtgtatgttattcagccaactacacagcgaaagaggaagaatgaacatttgaagaaatattgattgaaaactttctaatcttgatgaaaatgttaatttataagtacatgaagcttaagaaattttaagtagtataaacttaaagatatataacacctattctccacttattaaacaaatgaaagccaaaaaacagagaatcttcaaagtattaagagggtagtgacttatcatatacaattgtcccttgacaatattaatagcagaccttgcaaaagaaatcaagaaggccagaacattatattcaaagtgataaaaaaaagactgccaatcaagagttctatatgaaacaaataacccttcacaagtgaatagataataaaaaacagaggatctatcattagcacacctgacctacaggggatactaaaagaagtcattaagtatgaaataaaaggtactagagagcaactcaaatttgtacaaaaaacagtaagaactgataaagatatcatttttatggggttgtaatgtatacaaatgaaattttcttgataattaatcacaaaggagagggtgataatgatgttatactggaatacagtttagtacactattaaaattaagttgatatttatccaagctaaattgctttaaattaagatgttaatccccaggatcacatctaagaaaattactaaaacaaatatagtaaacgacatcctaataaaatttaagagataccttagaaaataactatttaatccaaagaagataatgatagagaaatacaggaatataaaatacctcagtcatgtaagaatctaatagcaaaatgtcaggcataaattctacattattggtaattacgttacatgtaaacaaagtgaatgtacatattgtctgcaagatttagagacacaataagtagaaagtacttatgtactttctaatggaaaaaaaacatgtcatataaccagtaatcagaagagtgattgattagttataacaatgagaaaaagactttcagacaaaaattgttcttagagaaaaaattggacattttttactgataaaagtgtaaaactattagaagaatgtaacaattataaatatatatgcacctaacaacaatgttctaaattacatttaaaaactacagaattaatgagagaaatatacaatctcaaccataatatttagacttaaatattctactattgacaatacatagaacaaggagacaaaaaatcaacacaaattggaggctcgaatgacacacaaaaaatcaaccaattctaaccaatatctatggaatgtactgtgcaacaacagcagaatacacattttttccattgtccataaaatattttcttggagagactatatgttcagatataaaataaacctcaaaatatttgaatggcttaaatcatacaaaatatattatcgacacgtaatagaataaaattaacaattaataacaaaagtacatttggaaaatttaacaaatagtgtggtgctctcctaaataaccaatttaaaaaagaaaaaaatcacaagggagattatcagatgaataaatacaaaatcacaatataccaaaagtgaaggcatgcagctataggagtaccaatggaaaaatatatagctgtaaataaccatattaaatgaaaaaagaaaagatctcaaatcaataacctgaattaccaccttaataaactagaaaaagcacaaaaaatgtaacccaaagtaggcagaagaagaaaataataaagcttacagtggaagtagattattaataaaggataggagaaattagcaattatcaaaagtttttttcctgaaaaagtcaaccaggatgacaagactttatctggactgatcagataaagagcatgatggagaaagtatgcaaaacatttaaataagcaataagaaaattataagaaaatactataaaaaactatatcccattaaagtagacaaattcctaagaaagcataagctatcaaaagtcatttaagaaggaatagaaaattcaaataaatatgcaataagtaaggatactgaattagtaatcaattttcaaccaatggaatcccatgcctagccagcttcaaagatgaattccatcgaacttttaaacataaataaacatcaattctccacaaacttaactgaatatagaagagaattgactactttgtaactcattttatgaggccaaaattactctgttgcctaaaccagacaggcttcacaagaaatgaaaattacacaacacatttatggatacacactcccaaattatcaagaaaaaactagcaaatcaaactcggcaatatatgaaaagaatcgtgccctgtgaccacaaattatactaagaatgcaatgttaatttaacatttaaaaatcaatgagtgtaataccttatgttaatagaataaaggagaaaaatcatatgatcatctctgtatttaaaaacaatattggacaaaaaccaacaatatttgcacagtatttattagaaatgacaaatgagttcaataaggctgtagccacatgatctatatacaaaaataaattgctttactatattctagcaattaacaatccaaaataaaattaagaatacaatttcatttctgtgaaaaatgtcattagaattttgaaaggaattgcattgactctgcagatcactgtgggtattttggacgttttacagttgaaaaaaaataaaacacttgggagtaaattttacaagtcttgtgggtgtaagacttgtaaactgagaaccacaaaatattactgaaaatattaaagcagacttaaatatatgaaaagtaatccgtgtttatgtatcagaaaaaaatttgttaaaatggcagtagttcccaaattaatatgccaaaattcttaccaaaattccagtatctttttttgttgttgttccataaatgtgtgtgtgtgtttgtattagtcagggttctctagagggacagaataggaaatatgtatatgtgaaagggattttattaaggagaattgactcacatgatcacaaggtgaagtcccactacaggctgtctgcaagttgaagagcaaggaagccagtagcggctcagtccaagtcccaaaacctcaaaagtaggaaaatggtcagtgcagccttcagtctgtggccaaaggcccaagagccccttgcaaaccgctggtgtaagttcaaagagtgcaaaggacaaagaacctggggtctgatgtttaaaggcaggaagcatccagcacaggagaaacacaaaagcaggaagaccccccactctgcttcttccaccttctgcctgctttttctagccagctggtggcctattggatggtgcccacccacattgtgaatgcgtctttctgagtgtgggttttcctctccgagtccactgactcaaatgttaatcccttctggcaacacccagaaacaatattttgcatccttcaatccaaacaagttaacacttaatattaattacacttaatgtgtaatgatataaaaccttccatttaaggtcagttaatttttaacaagggtatcaaagcattttggtagggaaaaaaagtatcttttcaaaaaattgtgctgtgaaaactgggtatcacatggaaaagaataaagttgtaatcctatctcaaatcatatataaatttaactctcaatatttcaaagaattaaatctaagggtgaaaacactaaatcttttacaagacatgtagcagtaagtgtttacatctttagttaggcaattgctacttagatgagacataaaaggtgtacgcagcaaaatatttattaaacataattcaatttctcttaaaatatgaacaaattacttcacgttccacatttaacttctgcaccattttgagaaggatttttttttttaatcccaggttagtatatcaagatacttaaaattttgcctatgaagaaacatggtaaacacttccacaatcaaaaacaatggaatcttcagcaaaagattagtctatttaacgtaaacaaaaactattttatgggtctaaataaaagagaaattgaaataaagaaaaatattcatcttgtaagtattattaatttttattttttatcagtttttattctactgaagaatatggattgtcttgttttaggaaacatcttaggacgactcctttaatcatttttattttttaatccttctctatcagtgagatacctgactttcaaatagttgttctgggattcctcctaactcccaagtaactccttagggaatatcctcaatgatcagatggtaaaaggggaggctatgaccaggaaatattctgggttttctacctacactcaaatgagaacatctgtcctttatcagcttcgaaaatatttgaaaacatgtagtagcataaagtactttcatatgaataatttaggatgggataaaatacagacggcaagtttttcagcttcgtgaatcaggaaaccataacatgagtatacatctttattttattgtcgaaacatagctaatgttgtctacttttgtttgtttgtaatttgattctttaccagactagatctttttcctctcagttataaggaggcttcatgtgcatacatctctggatctgcaagaacagaactttagtgtttgaattcattttagcaatcctaatctcagatccaactttcatgttgatgcctttagaaataaataaacttttcatttctcaagtacagaagagtccagttttcttcatacattgaatgtgatggacaatatgggctgaagagtttgccagaggaagaaacatgtttggtctcggaattaacatgtataatattacagaacactctacattatccattaaatcaaaatcattgtgatatcatcctgacccaaatggaatattgggaaggttctgtttcagaactaatttttctgaggagttttattgactaatcggatcatccattgctttgttcccttactggaatggataaaaagctataaagcatcatttttctaggaaattattggaaatgaattgatctattgcttctagacaagaaaatcatgttaatctaaaacaaaatgtgcttttcaatggagatgatccaaagagaaattaagatgattaattcaaggcaagaacaagtctgatggctgattagactactggctgaatgtagtgaaaaacttcttgataatcattaagtgataggagcaacatggaccatgtttgatcacagaaatatagaagatggcatcagaagctacaaggatatctactatcctttgttcatcccagtatctggcttagtttatcaagattttgtacaaatgttctgttagagtacctacttaaacacttataaaatggcaagagtcatcactagcagctagaatctagatagctttatttgataatttatttataaggatttaagaatcagttcattcggccgagcgccgtggctcacgcctctaatcccagcacttcaggaggctgacgtgggcggaccatgaggtcaggagatcgagaccatcctggctaacacggtgaaaccccgtctctactaaaaatacaaaaaattagccgggtatggtggcgggtggctgtagtccccgctacttgggagtctgaggcaggagaatggtgtgaacccgggaggcggagcttgcagtgagccgagatcacaccactgcactccagcctgggccacagagcgggactccatctcaaaaaaaaaaaaaaaaggatcagttcattctaaactttgtactgacaaattggaatgattctcaaaccaagtaccaggaaactgagacgacataaaatttttctagaaagtgaaagttactgctgagtctaaaatttcacctactccaattctgaacttatatgccagccacagtttccagttatttctacatcgaattggatatttttttttactctcagtgacttcagaacagaagacttcttatgattcatcacataggttaatatatgttagcattgtttcatctgaccatatcatgcatcaattaaaacagtaggcaatattacatactgaacgatttaaatgatagtcattttttaagttttatgcttttgtttctatgttggatattttccttttgtattataatttttttcccagttagaaacaatggttttaacttttatttttaaaaattcaaattttcaatcaatagtaggtaaattccagttgaaaaatcaaacaatgcctaaactttatttcatgtatattcctaatagaatattaagtatagataattagtgaataggagctgtggtattaacgtggacacaactaggctgttgagatcctgcctgttatttatttgtaaataaacaattaaaacctgctagtactgtcgaaaattttccatttttttcccccttggtcatggggaacaaaatttttagaaaatcaactcctacaacataaaaaaccaatagagaaaccaaacaaaaatgtattatattgaccaggatttatgtaggagtgcagtggtagataaactttcaaccacattatcaaaacaaaaaggtaaaaaaaaaaaaaaatagcatgatcttattagatgcagaaaaaaatctaaaatctaaaataaaaaatgtagcatctgtccattaatataaaccttctcaaacaagaaaagagcagggatactctctcaaagactatttacagacagaaacacaaacaatgtgaggagtaaataaaacacattaataaaaaatattgaatgcttatcatttgggatcatagattaaacaaagatgactgctataacacttttatttattatggtactgaaactcaaaaccattgcattatatcaagaaaatataaggttaagtagtattatataaggaggaaatattcgaattttgatggaaaaaaataaacttttatttttcaaaataatttgattacctgcatagaacacaaaaggttttctgaaaaacagcaatacaaataaacaaggtatctaaactcaatttgcttagtttaggcctgaaaaaagaacctcaattacatttgtatatctgtcagtaaaattaaaaaatataattaaaatatattaaagttaaacatgtaaacagaaacaaggatatttagatatgaatataacaatgatataaaatttacccagagaaaattttaattctcaatgaagattattagaaaagatctagttatgtaaagataatttgcttatgggtgtgaaagacccattactgtaaaggtatcaattctctgttaattgataaattgaatgcaatttaaaaatttttacatggtgtttacttataaagaacattgacaagctgaacctgaaggttatagaaaagcaaaataataatgctaccaagacactcctgaggaagagtaagcagggtggcctgtcattctagttatcaatctattataaaaactgcagtgattaaaatactgtgtcatgaacatcatcattttaaaaaagatctaagatagttattagtgaacccagaaattcaatattacttaggttatgtgagaagtagagtgtgtttcaaaagcctaattctaacgttggcataataaattcatattccaatgcagcagtaaggagttgatgccacctttcagctgctggaacaatgtcagtggatgcctgctaaaattcaaatcttaaataaggtcaaatgtttcaccacatactatcaaaatgtcaagattttaattgaaagttactcattatagcaagaatctataagatctcatgttaaataaaatgagaaaatcaacagatactaaaactaagatgacagaaatatttaaatgatcacaaaagaaatttaacacagccattattaactgtttcaacaagcaattacaaatacatttgaaacaaatggaaagaaaaagaaagtatggcacagaaatagaaagacacataaaaaaatagaagattaaaaatgtggaaactttaaaactgaaaaattcagtagacaaaataaaaatatatgtaagtgtacttgtatactgaatattgcaatattaaaaaaaatataaataaatagcaccacaaagtttatacattggaagaattatggtgaagatgtaaattctacccaaattgagagaaatgttcattgcaattcctctgaaaatgcctgtaatacttttccagacaaaagttagtattgtaaaagttttattgtaaaagttatatagaaataagaggaaatgaaaatagctaaagcaacactatagataataaaatgagtagactcactctagtcaatacgaaaacttaaatatgtagctactatactcatgacggtatggttttgagaggtagagatacaacaaagataaacaaaacagaatggagtacccagaaataacttccaaacaaggacagccacccgagttttcataaaggtacaaaacaattcctggagtaaggatggtacttttaacgaaggtgctgaagccactggcaatttataagggaaataaaaaaccacaccctacattaatattacataaaaatcaatcatagacttaaatattaaatatgccttggttcaagggatagaaagtcacagtaaggatggcaatgccagtggaaccaagctgcttgaggctctggactgcatcctaccacaaacttgtccaactgacaagcccttggtggtattggtacttttcctgttggccaagtggagactggtgttctcaaacctggtatgctggtcacctttgctccggtcagtgttacaactgaagtaaaatctgtcgaaatgcaccatgaagctttgagtgaagctcttcctagggacaatgtgggcctcaatatcaagaaagtgtctgtcaaggatgctcgtcctggcaacgttgctggtgacagaaaaaacgacccaccagtggaagcagctggtttcaccgctcaggtgcttatcctgaaccatccgggccagttcagcactggctatgcccctgtgctggattgccacacagctcacattgcatgcaactttgctgagctgaaggaaaagattgatatctgttctggtaaaaagctggaagatgaccctaaattcttgaagtctggtgatgctgccatcgttgatatggttcttggcgagcacatgtgtgttgagagcttctcagactatccacctctgggtcactttgctgttcatgatatgagacagacagttgccatgggtgtcatcaaagcattggacaagaaggctgctggagctggcaaggtcaccaagtctgcacagaaagctcagaaggataaatgaatattatgcgtaatacctgccaccccggtcttaatcagtgctggaagaacagcctcagaactgtttgtttcaattggccatttaagttcagtagtaaaagactggttaatgataacgatgcatcgtgaaaccttcagaaggaaaggagaatgttttgtggaccactttggttttcttttttgggtgtggcaggtttaaagtattagtttttaaaatcagtactttttaatggaaacaatttgaccaaaaatttatcacagaattttgagacccattaaaaaagtttaatgagaaaaaatttactattagacttttaggatataacatagggaaaaacctttacaatctacagttttttaaaaagtttttatatataacaccaggaacaagatcagttaataaaaaaagataaattgacttcatcaaaattaaaatatttttgtgcgtgcattattttgtaaagagaatgaaaagacaagctacagacggagaaagtattgtaaaagcacatatccaaaaaaggacttatatctggaatatgtaaagaactctcaaaatgcaacaataaaaaatccaattacaaaatgtccaaagatacatagaggcatttcactgaaaacaacattcgtatgataaataagcacatcaaaagatatccaacatcactagcaattagggaaatgcaaattaagactacaaagtgatattactacacacctattagaacagcaaaaattttaaaaaattgacgtgacaataccaaatgttggtgaggatacaaagaaactgaatccctgatatactgttggtagaaatgtaaaatggaacagccgcttttagcagtagcttaaaaagtggtttggaaattttgtaaaaaaactaaacatatgcttatcatatgatccagcaattgcactcctagccatttaagccagggagctgaaaatgtgtgtctatgcaaatatctctacacaaatatttatagtacctttatttataacagcaccaaactggaaacaaccaaagtgctcccttatggacaagtgcttaaataaacttggtacatccatataatagagtatgatttagcaacaaatagtaaccgactgctgatgcaatcaacagcttgaatgaatcttgaggctatcacgctgactgaaaacagctaatcttaaaaaggtcacatagtatgtaaaacttcttacataaccataaaaagtggccaaatcatagaaaagaaaaaacaaattagtggttgctgaaaggtagagttagggcctatgagaagatggtgaacgggactgtaaagaaatagcacgaggggaatgttcatgataatgggagagttctatggcttgactgtggtgatgtttacaccagcctacacgtgtgattgcaccatgtagagctacactcatacattgtaccaatgttcgctgatagtcattgttgattttatttttgtgtacttgatatgccatctatacattattttgcttgacttccaagcaacaacgtggtgaaattaacactgtggatataatttatagaaaaataatttaggttactgcttttacaattctatagttaccactgctattggaccaaaggcctagtaaaaaaaaaataaggtgaagtatacagctatgaaatatgaagaacctccttacctggtaggaggtgggctgttgattgctgacatggtcttctacaagtctaatgtaacttaaggcagtagctccttcactgattgccattctttactgtctgaactaattctattcaaatgcgggcaggtttgtataacaatggcaacagaaatccagataaagtcacgtgttgtcttttctgttttatgtcttcctttgcactgctttttggctaataaagctataaaccaaatgagagtaaccttgaaatatgtcttcatcatccacgccagtttttacctttggaatccagtccattattaatacaattcttatgctcattaaatacggttactttgtacctagaatattctggaatatctccctttagaccatgaatctgtggttttgagaattaatttaaaacattttcaaaaacctttgaatctgtaaaagaacaattttcaaattggaaggtgcatgaggtagcagaaagattgaggagcagagatcatcagaattcttcattccaagcctccttcagtgatttgctatttgacctcaggcaatttacttatttacacggagttatcatttttctaaatcaataactggcatttggaaattatacctaattatcttaaagagagtttttttccacaataaaaagacacattgaaaactttaaaaagagtaataattagcacaggttaaatcaagggaaggtttgctgtcatttgtctgatattgaaacagcaggagataaaaagtgggtgtcaaaatacaaagaaaaaattaagaccaataattttgagttatcttttcaaatttggttaattcaaaaggaagaattacaatggtatcttgattattttgtgaattttacaaacaagttcaacttgctcccatatcagttgctatttatggtgcaaaacaaaagtgtgaaatgttattttgcaggtgaaggacggagcactttagtgtggctccatgacattgtattcttattgccgaaagccttcatgagaatttgatgatgttaaattgttaccttcttactctagctattgacttgaattgatatttgatctctttataaagaagaaaataaagtataactttaaaatcgtattttgttttgaaatctaacacactccttgaaatctaacacactcacacaacagaaatggattcatgagtgacatacattattcagctatcaaacaatcaccaacagtcacctcaagataagcttaataggtcattgcagttacctttataatattagaaacatttagtaaagaatattaactaggtgacccaaaatatactgtcttttttggtttcttctgcaatatatgactaattcattgtaatgttatcttaccatggcaataattttttatgcatgccccttagtcatattcctgatactgtttaaaattaataattttctttcttgtctatagaatattcagtttttcattgttcacttaaaatttaattttttttctccagaacaacagaaaacctattttgggaaaatagatatttcttattgtatttgatttagcttcagaattaaataatatgttataatcaaagtgatttcgaaggctaaggaggtattatggaaagtgctctggaaagcttactagaaacaaatgttctcaatgaactaaagatgaagaggatggatgatcccatagcagcacactgtgataatttttaactgactttgtgagtaatctattctgaaccacacataaaagaaaagaataaagcattttgttccctacttttgtcattcctcggttaatgttttttacagagagaaaatgcaaatcaaagttacctaggttttttgtattgcagctgtctttaaattaattttttaaaatatcttcacacacttacctataaaactatagaaaaataatagggttagatggataatgggtaaatgagataattataaattatctttaataatgaaccaatactgccatctatcgcttccaacacaagtccattacacattaaattaatgtgcaatagaatgaggatatatgcctttaagtcattttatatagctgaaatatcacaaatttgataggctaaagttacacttcagaatgtattaggttatatacagcacatatttgttacattacattgattatatttattatcttttaggacatagcttccatttatcagaatttataccctttctacaaagttttatatcctctatatatggtgtgagtgtagggtcatactaagtgtcggatgtttgaatcctgagtagaaactatgggtgttgtatataaatggtattcagctaaaaaattaaataaagcaatctgcatatatgtaatttatgcaaccatactgagaatttccatgctcagttttatacaaaacttgctgtaagaaacgaaagtgaaaaaaaagtccaaaatccttcttccaagaagatattctttcagcaattctccaacttgcagtattgctctgggcttcattttgcctcatattttagtctaccagaagcaagtgattatatgtaaagtgaatctggctttcagagatctacttacctgcctggacccattcataataaagtcataaatgcaagaaaataattgaatgacatcccgaatatgttaaacaacaacaaaaggcaatgaaacagcaatccagaattctataccagcaaaaaccttctttaaaaaaagaaagtgaatttgagacatttttgaaagacatggtggctcacacctgtagtacaagcactttgggaggtcaaggcaagaggatcatttgaggtcaggagctcaagatcagcctgggcaacattgggagacctaatctctataaataattttaaaaaatagccaggcatggtaatgcacacctgtggtcccactgttggagatgctgaggtaggagaatcacctgagccagggagtttgaggctgcggtgagccatgattgcaccactgcactccagactgggcaacagagtaagacctcatctcaaagacaagaagaaaaataaaaagaaacactcagaagatttactctacaggaaatactaaggaaggaaaatgatccaaattgaaatatattacagcaagaaggatgtgcatcagaaaggaaaattttaacaggtgactgtttaagtaccaattgtaactatatcatgtaggaatttttccattggtgttattatggtttaatgtatatccaataaatttcaccagttttagtttacagtttcatgagttttggcaaatgagtgcagtcagataatcaccacaataatcaacaatatacaccagttccatcattggagagatttctctaaatgtcctttgtggctgtggccagcctcttcattaacccagcattcattgtttcaggccccaataattttacagagaccatataaataaaatcacatgttacaaaagatttgggtatcacttatttatgcattatgatgttgtgtatatcaatagtttgtactttttgtcatttagtagtattctattgtaagcaaataccattttttgtttgtttgtttgtttttatttctcagttgaggtacatttgttttgcttccagtattggtatattaaaaataaatatggtataaatattctgatataggtttcttagtaagcttagtattttgtttcacttggagaggtatctaggagtgggattatagagtcatatcgcaagtgtatgcttgatgctctaagaagacttccaaattacttttcaaaataactgtaacattctgcatattcagtaatagtgcatgagaatttctgaactttgtgttcctatcaacacttctcattgtgaatttgtttgtttagacgttttaataggggtcttttgatacatttgtccagtttttcttttgggataccttatgacaaatgatgttgaacatctattcttgtacttatttgccatctgcatatcttatctgatgaagtacttgttcagatttttttttttttgagatggagtctcacaccgtccccgaggctggagtgcaatgctgcaatcttggctcactgtaacctccatctcccaggttcaagcaatcctcctgcctcagcctcctgagtagctgggactacaggcatgtgccaccactcccagctatttttttgtatttttagtagagatggggtttcactatgttggccagactggtctcgaactcctgacctcctgatccacacacctcagcctcacaaagtgctgggattacaggcgtgagccaccgtgctcggcccagatttttatccattgtttaaatgggttgtttgttttcatattgcttgcaggttttagtttttgttttttattctggatacagatcctttatataatttgcaaatatttcttcccaaaatgtagtttccccctcctttctcctaacactatatttcagataacagaagttttaaatttttataaagaccaatttatcaatttctttctcttataatatatgcttttggtatcatgtctaaggaatcattgcttatgccaaggtcccaaagactttcttgtatgcttaattctacaagattttaagcttaaaaatattgtcttacattaggtctaaaattggtttcaagttttttataggaagtgaggtataaatgaggtatatatggggtataaaaagaggctgttgtatatatgtatatatagattaaaacatatctttatatatacaaatataaaaacatttgtgtgtatataagttgcatataaatatataactatatatacaaatatgtataatcaacatgtatttattatagaatatgttataaatgacatattgtatatgttgtatatatagttaatatatttatataacttttatataattataatgttatatatttaaataacttttatataattatatgttatatgttgacttatagttatatataattatataaatgttaaatatgtagctatatgtgaatatacaacatatacaatatttcacatataacatatattctataataaaaatatccctttatatatatggttatccattagtttcagcacaatttgttgaaacattttgttttttatgcttaattatttttgcatatttgttgaaaatcactgactatatttagcatttctattgcttgactcgctcttctcttctacaaatttgcatgtccataaattcttcaatatcatgctatcttggttactgtagttttgcaatctgataatgatttgtcttgaagtcagaaaatgtaagaaacctaactttgttcttcatcttcatctgtgtttctacctgaaatttaaaatcagcttctccaacactaaaaatatccttctagtactttttttgttggttttttagttgcggtgattttgtagatgacattgagaattgacatcttaataataatgatgtctgctaatcaacaaacatgaaatattttgttttatagtttacaacatagacattgcacatatgttggaagatttacacctaaaagtattttatgagttttgtagtgcaattgtatgtgctacttaatttttgaatttgttcaagcttctcctcctgaaaatggtctctgtttttctttgtctctgtctatgttatttgtcataaagaagggaactataagacacagacttaaaacccttagaagcacgttgctcaagctgggcccagagactgttgagttttggattcacatcacataggtgttggtttagacaaactgtgctgtgagtccctgagaaacaatagtggatgaagttcccctttgtccttttgtatgacttgagagcttggcttttgtgaccaagtgagaacaccctctcttagtccctgccagcaagacgggttattgtcagcctacatcatgtggccagtctaagatttctgacccagaaatcttcatacaaggtgttggggaaaggattagagagccagccttgtctccaagtcctctatagagcagggtcatttttacaaccagtgttagttaatctatggtagaattttgattacagaagcaataaacacaatcacagaatattttttcttgtgttgttgttctaaaaatgttatacctaactcagagcaaaattacccccctggttccctttctgacttcatttcccatcactgccaccccctgctctctccacacctcccatgctggcctcatccttatggtttttccacaataagggtaattagttttaggtgcttccacctcctcatctgtctggctccaacattctccccttagatcctgtaccatatgctctcttttttccttatggccactgttcaaatgtcaccacagcagataatctttccttgattactccgcttaaagtacattctcaccccagcagctctgtttcctgctttaaagcacccatccaagatgacatatatatttaacaattgcaacctacagctggaatacaagttccaagaggaaataattttgttttgttcaccaatttaccttcaacaccaatttgtaaatttgtggtcctagtaaacatttaagagttcagttagactaatccagctgtaaaatagtttcagtggtgatatgtaattttttactatgcacttctattatctacagtgatagcaaaatgctattttgacaatgcaacattaaaattttgcaagcctgttcagaacatatcaattgcataaacatgagaattaattttattacatttaatattttacatttaatattttatagttttagttgcaacactgttttagtgtcttttttgctctacaatttattaataaataatttaaagtaggattttcataatatatttttaaacacatattttgttttactatttaagagaaaagttaaaaaaaggacaaaacaaaacaagcatggcatatatttactattcgttttctttcaactccctaacacatttgcattgtattaaatgaaatacatgatttctataaagccatctgatattattataggagggagctagatgataagagacaagtacttaatgttttacaatcttacaaaatattcatttaatgaccgttatgtataacactgtcaacctggatatttagaccattcaccccacataccctgtttatctctgctaagcatcacatcccctaaactgagctagttaagtgctacataataagtacatctttgcaaaagctgttaaaaggagcataaaaccaaaatcaaaccccaaacttagtgggagacacaagtactggaaaagcagaaaacatgggttttattatttaatacacagagacctatcagcactacatcagaactttgaatttcaagaggagagaaatcgtcttcttttgtgtaatttgtttctgcatgtattagtttgttctcatgctcttaataaagacatatcctgaaactgagtaatttacaaaggaaaaaggtttaattgactaacagttccacaaagctggggaggccttacaattaagacagaaagcgattgaggagcaaagtcacgtcttacatggtggcaggcaagagagcttgtggaggggaactctcctttatgaaaccatcagatttcgtaaggcttattcactatcaggagaacagcacaggaaagacccatcaccatgattcagttacctcccgtgtggtccctccatgacacgtgggaattacaggagctacaattcaagatgagatttgggttggggacacagccaaaccatatcactgcagagagccaatttctattttttccatgtattctatttttctcatatggttgggtttggaatagtaataaaaacaatatatatatctagatcataaaacatgctctatgtaaaattatttacagactcataagacatgcaaaacttttaactcacatacaaaagacacaaatatggtgattcagtgaccactataaatatatttatgtaagcatggttatgatagatacgtagacaaaataataaaaggtaaattggagtatacaaatcattaacagatgccaggctcggtggctcacacttgtaatcccagcactttgggaggctgaggcgggcagatcatgaggtcaggagaccgcgaccatacttgctaacatggtaaaaccctgtctctactaaaaatacaaaaaattagccaggtgtggtggcatgtgcctgtagtcccagctacttgggaggctgaggcaggagaatcgcttgaacccaggaggcggaggttgcagtgagccagtatcatgccactgcactgcaacctgggtgtcagagtatgactctgtctcaaaaaaaaaaaaaagaaaagaatttattagacgaatataggaaaaccataattaataaaatgtacttcttatttacaaggttttagattcattgcccgatagtttagtatttgttaatctggtaaaatacataattgggtatgggtgaagcagctataaaagagactccccaaacacaatattttaatctagttttatctctcacttaacaatatggctgatctggtgggcttgatggtgtcagaaacgaagtctccatccatttttgagttttgccattcccacattcccacatgctattgcttggtgacatccagccatgaggttaaaattaaaaaaaaaaaaaaaaaaaaaaagaaagagagggaaaactcatattctttgaagtaaattattctgcaaatattctgcttatatttcattggcccaaacttagtcgcatcatgccaccttgaggtcatctgaagtactaggctgagaagaaaataatttgcatgacttaatatttgctattggttagctcccacacctgacccagaaatcttcatacaaggtgttgcggaaaggattagagagccagctttgtctccaagtcctctatagagcagggtcatttttacaactagtattagttcatctatggtagaactttgattacagaagcaataaacacaatcacacaatattttttctcgtgttgttgctttttccatccagttctagtaaattttcaagctcaatttgcacatgctttgtctttcaaaatatcccagggcagcactttgggaggccgaggtgggcggatctcgaggtcagaagatcgagaccatcctggctaacatggtgaaaccctgtctctactaaaaacacacaaaaaaattagccgggtgtggtagcgggcgcctgtagtcccagctactagggaggctgaggcaggagaatggcgtgaacccgggaggtggagcttacagtgagccgagatcgcgccactgcacacctgcctgggcgacagagcgaaactccgtctcaaatatatatatacacatatatatatatatatatatatatatatatacacacacatatatatatatatgtatatatatatgtgtatatatatatacatatatatatatatacatatatatatatatatatatgtatatatatcccaaggaacattcttaccataacttaacaaggatctgagtaatatctaagtcctttttcctacctaatctttaatctactagtggggatgtcatttagattttggattgtttattgttttttggttttgtttttgtagtatgttaacacatgtttgtaccaatatttctcttggatataataattaataggtgacttcagcaaggaactccaaaatcagagttcatgttttccttctgtaataatctaaatagttttttttaaaggcaaacatcaaaatgttgaggtgttgaagacccaggttccccccatgtctagctgtactatccctaggatggattacctgtttagatgaggatacctagccactaagccaacattccagcttttaataaaggagaaaaagagaaggatgacacatctttcttactaagggccagcctacggtgacatacatctcctctcctcaatcgttgcctagatgctagcagtatatccaccctaactgtaataaacattggacagctgtgaacagctatgaaacatgagaaaaatcatattgttatgaaataaaggagtaaaggtattaaaggtacaacaaaaagctaaggaatgtacagagttttaataagtcaaaatttaaataagagactagcttgaatcaaaatgaattttaaatccaataggctatattgttagtcttcaccatgggaacaaggacaccactaacaaactacagatcactttaattttcttgaaaaccatttgcaaattaaattcagaggaaaatggttacttaaatatataattgacttgtattttagggaatcagatttggcatttgactatatatgtgcacaaacataaagtatggcacacaacaaaagagtatgataaaaatcggaactgaagcaaatgaactgctgtatctataattgagtttgcctaagaaatcttccactcactcttcttctatagcaaggccctttttaatatcctgcaacagctgattgcctgattaatgtcccataaaatgcataacttgctattatgaatgacctggattttggcaggaaaaaggatagacaatattataagtgaaacacgagctataaattatcttttgctagcattgaatgcaattttagacttgcaaacattcataaccaaaacctttccttttgagtgtttcaaaaggattttttcatagtttaagcatggatcagaatgtgctgtttataatggactctgaaagattacatttgcttgataaaacagtgacacaatagagagtgtttcacttttcacttactgaaacaagtgtttgacacatggtaaacattctatacgcattagctattgtatcttacaatatctgttaaacagaatcaggttattttctaaaaggatagaattagatcatactttctacttgacatgaattacttataaaataattttaatgtctatcttgccacggttgtaaaagttttatttatttaagcaaattaagcaaaaaaagcttaccttctgctatgtagctttcagtgtaattaatatagtcattgactcacaatagtgaatttagaattttcaaaaaagacatttcgtttagtgagaagtgatgcggcttctctggaacctgactacctcagttagaattctggctcatcctctcactaatggtgtgaacttggtcatgttaatacgtatttctgtgtcttctttccttgttgggaaaatgggaatataattagtaaatacctccttgtgatagtgcatataatgtatttagaagagagttttgtacagaataagagttcaattaagtgaagccaactattatcgttacttattgttgtttccgttactattatttccttaaagatttatcaaaacaataaacaaaaggaaaacatgaaaacatgcctctttaagtctagtaataactttatgcaatttatttttacttccgagaaaataaaatattccccctaaatgtacttcttattagtcaaagtctatctgtttaaaatcaaagtcttggcaaacttgatgtgacagttgcctaacttgtcaaaactatttacttttctttttccttttttttttttttttattgagcgtataaatgtgacagagggagcaggcatgagaaagtagatcatgtatcatttcctaaaaaggagagtaatcataaaataacaacattccctccaaaaaggaaaagggctattgttgtcatgacagaccaatggagattatatgaaaaaccatttcttggccaggtgcggtgcctcacgcctgtaatcctagcactttgggaggccaaggcgggcagattgcctgagctcagaagttcgagaccagcctgggcaacacagtgaaaccctgtctctaccaaaatacaaaaaattagccaggcgtggtggcacatgcctgtagtcccagctacttgagaggctgaggcagagaatcgcttgaacctaggaggcagaggctgcagtgagctgagatcatgtcactgcactccagcctgggtgacagagagagactccgtctccaacaaacaaacaaacaaacaaacaaacaaaacaaacaaacaaaaaaccaaagccaaaacaaacaaacaaacaaaaaacatttctccattcaatatgtaaacatatcaccctgaatctcctttctcacttgtgaaaactgacattcgggtctctgtgatgttttcacaaagtatgtgacagtggtagacacagttgtactgccaaattggccaaagagttttgttttgtcttttgacaaattcttgctctgtcacccaggctgaagtgcagtgtgcagtctcagcttccacaacttctgcctcctgagttcaagcaattctcgtgtctcagcctcccaagtagatgggattacaggtgtatgcccccatgcctggctaattttcccgtatttttagtagagacagggtttcaccatgttggccaggctggtctcaaactcctggccaaatgattcagccgccagagcctcccaaagtgtgggaattacatgtatgagccactgtggctggctccaaagagagtttttaacaacagtagtaaaatatctgttgacatttttaagaagtgaggcaatattttttttctattattccccttaagtattaagagtacattaaaaaatctttttgctgcattactatacttagccagataattatttaataataatagccatagtttcttgaagaaaaaaattctattctcttcacttagctgcatctttatattttaacaacaaataacaagtgtataaagcttaccaacttctctatatgaaataacgaaaaacatatttttctcctagttaatctacttaatacatgattatatattgcaatatggagaaaataaaaatctaatatttataacaatcacatcacataaagtcaactttaatccatgagttgtcaacatcatgaccaaaattatgttaatatattattgtagaatattgcaactcaataagaaattataagtgcattgattttccttcttacgagggaaagattagggcactatcaatcaacagttcttagtttttgtattattttcacccttacaatttaagacaacatttttctgagctaaatggagtcaaaataatactaaactcatttatataaacctttcatattagagtttcttgtgggaaaatacatgttaactttagcattcaggcataaaaaaatagaaaataaaaaagacactcaaaatatatatttacttatcccatttaaacaggttactacaaatattttcctttattactgaaaatgtaaaaatgttaattttcacaattaaattatatgtctccttatattattatagattttttcctatcacataaagtgaacttcagtttattgtatatttgttgattgataaagccctcaggaaatatgctttataaggcattctgtattaaaactcaagtcttcataaaaacagagagagattatatttctatggtcaacttgactgtgatccgtaaatctacagaagaatgtaagaaggaaattactcttgtgttcttttgaatttgctttaatttaccacattttctaattagaacaatgtagctcaatattttgtttattgtcatatctgccagaaatctcagaccaaaataatgctcaaattgaacaaatcatcatttttaaaatattgctctttttggtttttgttatttttgttgttgtcttgcttctattttataggggtatttctgtttcaaatgtgtgtgccatcagaagcccattttggaagaatgaatgtattcagagtaatatatacacatgtataaatacattcaggcacacatatatacgtatgcatacatatttgtgtatgtatgtatacatatatattaagagattagatagatgattagatacatatattaatattgatgttacagattagacataagaaaactttttcctgcaaaggactatatgtattttattttattatttatttatttatttgagacagggtctcagtcttatgcccaggctggagtgcagtgatgttatctcggctcactgcagcttccgcctcccaggctcaggtgattctcttgcctcagcctccagagtacaggtgtgtgcccggctgtaactacacacctggctaatttttgtactttttcagtagagatggggttttgccatgttggtctgtctggtctcaagttcctggcctcattgatctgcctgccttgagctcccgaagtgttgagattacaggcatgagccaccattcctgaccagctatatgtattttaaatggcttgtggatttgtcataactgctcaactttgccactgtaataggtaagcaatcatggataatgtgtaaacaaaagagcatggcggtgtttcagtaaagctttatttatgaaaacaggcagcaagccagatttggcctagaggatgttgtttgcagacccggatataaatgatagattgagttacataatggatagggatatataacagatcctatgtactcataaaatactatccttattaatatacattcatcttctattctgatctttctcatattttatgtttgccaaaacataaaataactatatattcaaatccagtgaacggtggtatgaattctcattacttataggggctacattaatctcttcatgaaactaaaacatatcctgtgtaattgaataatattcatatttatttattttattcatttttttattctaaagcctttactttgagacatgaagaaaaaattgtacaggtacacatggaaaagacatgatcactgctgagtgaaaacgatctaaccaaaaagtctgaatgcctgtcagctgatgttgaagctgaaattctgggggtataacatgctggagggctgaaggcaatggataattagaattcctctccttccttctcaccctcttcttcaacagaatccacactaaccacttcataatccttcttaaggacaaccatgtcctggtgggcctcggaaaactctccttcctccacccgttcacccacggaatactgaacaaaggaacttggcatacatcaggtaaaacttgcggtccaggtgagcccacacctcagcaatggctgtgatgttgctcagtatgcacacagctctctgtcctttggctgggtctccaacaggtaccacagtgggaagttggtaactaatgccaaccttgaagctagagggacagcaatccacaaactggatgctgcatttgtttttgatggtgtcagtggcagcactgaagtctttgggaaccacgtcaccagggtacaataggctgcaagttatgtatttaccatggtgtggatcacatcttaccatctggttggctggctcaaaataagcattggtgatctctactacagaaaaccgttcatggtaggctttttcagcagagatgacaggggcacacatggccagagggaagtggatgtgggtatatggcactagattggtctggaattctgtcagatcaatattcagggctccatcaaatctgagggaagcagtgatagaggacacaatatggccaatgagatggttaaggttagtgtagtttggacactcaatattgagctttccaaaagtcatccaaatcacttttggaaaactgattaaatgatagaaagggtcaaggtgatttttcaacctttcctatatgaactatatcattggataaccaaatggtagatgtcatagatggcctcactgtctactatgaaggcacaatctgagtgctccagggtggtgtgggtggtgagaatggagtcgtagagctcaactactgctgtggaaacttggaggatggggggttgctgagtaaatggagaactgcagcttggacttcttgttataatcaacagaaagacataccatcagcagggagttgaacccagaaccagtctgttcaccaaaactgtggaaaactaagaagccctaaagacctgtgcactgatcagccagcttgtgaactcagtccaagatgaggtcaacgatctccttgtcaatgatgtagtggcctcatgcatagccattggcagcatcttccttggctgggatgagcttctcagggtggaagaggtggctagtaggtgtcagggtaaactgtgttaataactgtgggttccagatctacaaacatggtcctgggcacatgcttttcagtgcctgtctcactgaagaaggtgttaaaggagtcatctccccctcaaattgtcttgtcttgtcacttggcatctggccatggtgctggatgccatgttccaggcagtagagttaccagctggagctgccagtctggacaccaggctggccaatgtggatggagatgcactcacacatagtggctaagagttaggaggctaaagcgacaggagcagataacgggtccaatgaccgatcccaacaagctaagagtcaaggtaagtaatgcactcagtaatatttatatttaaacatcccctttagaatttgcacataaaaatgatcaaggtaaaactaatgtgaagttaaataagtctagctataaaagattatgattaagacaaaatgttgaagtcatgaaatgtatatgaaaaatacaactgtagttggaagtaatataacgttctggtagttttgaaggggatcacaaggaaatctggtgtcaactgtcatgaggtttgaactattgcttattgctagcctttcagttgctccaagaaggcattgacatatcattttaacctttacataatggtgacaaaacttgggtattaagttttgaaatgtcatcttaaactaattaatttatggctgtcagtagcagtggacacataatgtaacatactgtttaaatgtagtaaaaagatgacaatgaataggtgtttctctttcataaatacaatgaaaatgtataaacttccatactatttcaatgaatttattattaactttatttccaaacattacactgtatggtacattatagtttgttaatacccatttttgtatcagttttctttttttcataaatgattttttccttcaactctgtctctatatttttcgataaccttttctttcttatcattgtcttaattttaaaaggtcaaacattggacttatttaattttttattatatcaaacatttttatttcacttttaaaagaaaaatattttgagctctaacttgggaaacactttcaaaactcctgcatagtttcatgaaacttgaaattattgtttttaaaaatagtcactatgaaattatttctttctaatatagctaattctcagcttctacgtggaacccttggggctacaatgggggaccacattaacataaatcccaacctcgcagatttctattaaaaataatttcaagtggttctctattttattctattaatttagaaatgttttctaagcaaaatctgtcacatacctattattttcagtgactgtagtataaaactggcttggaagtcacattaatgaaaactttacgattacctcatctgagctatttatttccaaaaaaaagtttacaatacacatgacaagtatttcacaaacagcatcacacacatgaacatttttagtttaaaaaagatgaaaataatattagctaacatttcttgagctcctaccatgtactaggcactgttctaaagtgttagttaattatatcattacagttcaggattataactaaatctttttttttttttaatgaaccattggtaaacttacctacttaaagctatctgttgagaaatattcaagccatatttaagttcacttggcaattaacttgtaatcataaatgagtaaaatcttttaaaataaggaatatattttattttaaaaccaccttaaaaatagatgggaagacattgaggagcaatttttgtttgacctttaatggatgaatagctgaaagcctagaaaacaaaaataaaataaagtcagcaaggctgacaggaaagcatgagagaaagccacactgatctacgtgtcacacttagaatatttgaccctacaaacaatagataaattgattaatcaatttacccaaaatgtatactttgagaagattaatacaatttataatcttctagtcagactgatcaggaacaaggaaagaagatacaaatcatcaatgtagaaataatataaattggagaacagagaaatgcaaaacaaaataacaaaactcttgttagtaatcataattgagatgatagtattagtattgttattctgagacagttgtatgtacaatgagaaatcaagcaaatgagtaattacaggttattctcattctatcatctcttgtattttgagagccagaattataaaggcatatgaattgcaacaaagaggtaatatagaagaagtcttgcaaaaatcttataattttgaattggaaatgaagatggaaatatcagtatggcctcacaagcctttatctgtgtaactttgtctttatctattaatcctaaatcccctgaaaagaactagaaaatataataaactcagattgtagtactgtccaatttaaaagataatgtgttttgtggagaaatggaagtgttcatgcctatagaagaaaatgtacaagattgagtatagaccatcttgataaaacagacagcaaggaagctatcaatgaccgctaggatcatgcctgaagaattcaagagccaacctgctgatgttttgctcatcatagatgagacaaattgaacttcaataaggataagaggcacaatgaattgaaactcatcataaatccatgagtttatataaatgtgaaaactaataattgatcaactgctgaaaaaacagtgatccaaatcacttttggaaaactgattaaatgacagaaaggatcgagatgatttttccacctttcctgtatgaactgtatcattggataatcaaatagtagatgaaaggtagtattcctttgcaaaattattacacctgaaaaaataaaatgatagaattaaattgcaaccactttttaacaccaaatggaagatgaaatgaacaactagcaggcaataaatagctgggagaaaaataaaaataaaagccagaaggcagatatactgagcctcttgttaaaggaaatcatctaaagactttaatcaaatctttttctgaaatatattaaagtgtaccatgagtttataatcagcctgactcagattcaggaaaactttccaaggtaaactttacagtttttttttttttaaaaaaaaaagaagtaaaaggaaaagaaaaggatggagatttagacacagcgaaaatggggaaaactgtattctggtgtctcaggatacacatttgcttgacaaaacataaagaaattcaaggacttgattatgtatcaggatagtggttaactattgagataaagagcatttagtggtctgggccacaaagggagtcttttggaatgggtgggaaagttatatttcttaccctatacagggaacacaagtaagggcaacttacaataatacactaagccaaataaagaaaattcagaggtagttgtttaactgaattatcacaaaattcaaaatcatcaattttaagataaaagttcttttattgtattctttcttttgttagatttgttaataatggcataggtttcttaagactaaatgtaaaattattgacaatttgattttttccatccaagaacttcatcctacttcatttatcatattagttcattttccagaaactggggcagtaaatcatattccctcaagatattctacatataagcacagatcttaaagaatacatggctttagcaattgaacaatcaaatggatttagaaaaaaaaacaaaaaaacaaggaaatagtcaacttaaatttagtgtcctctcttctactaaggtttcaaaaccataggggaaaatgaagacagcttcaacataaattctgtgctaatgatattccatttttggcagagtaatttgtattgttaattaagtccctaatacatgacttttatatgcaattactaactggttaggaaacaatcaatgagagcattacctaccaattagtgttctttctcattaaatatttaattgctcagtggaactaaacatcacatgtccttgtccatgtaagttgaggaagatgaaagataaagcaacatatctgagtaaaatgtcatctctcacatccaaattgcttcccttttatttttcaaatgatctcttaaacatctttcattaaatggctagcctgtggtatttttctatcagtttcatcagtataatagttagggaatatttcccagagaatggttacagaaatatgaaacttctcattatgcagtcaccaattttcatgtgaaaattctgattccaaaactacgttctcttacctaaggtaaatcttggttcccacaaattaccaaaatcttatttcaatcacttgctgaaaacattgaatgatacaaaaacagctactcttgcccatttgaaagtgaagagtagaataaaagtcatttatatgaagatttaacaaaagttaaaaggtgagcaaaccttttctttaaggaggcacttaatatttttgtctttgctaacttcccattctgtcacaactattcaactctgccattgtgcgaaagttgccataaacaatatgttaacaaatttggaggactcttttcaataaaattttatgtacttatagaaaacaaatggctggctagatttagtctgagggctttagattatctgcctctggtatagaagtaaaactcaactcctgtcttttaggtattaatttattcattcatttaacacgtatttattctgtattcattaaatattctggtgatggactggcaataaacagataatgagtaaatatgtgtcaagtcaagtggcaataaattgtatgaggaaaattaaagcaataaattggggagatggtgtcaaggcatggttggaggatgggggcatgctacatggtagccagtgtagatttcactgataggtgacatataggagaaacacctgaaggataaagtgagtgtgaaactttatctgaggaagaaaattatcagaaccatatgcataaaggccatgagttagcaacatatatattatggtggagacacaacaagacaactaacagctcagagcagaaagagaaagggtgagagtataatatgaagccagtatagtaggggggtggcatttggggaacacataacatagtctctttatggtattctaataactcttcacttccatcctgagaagatgaaaatctattacagtaacatgaggtgacgtgatgtgacttgtatgtttcaggtgaatcaccctggttgctttgttgagaatagaatgtagagaggcaaacctggaggcaaggagaagtcgtagtaggtattgtagccatctaggttagaggtcatggcgacttcagagcagtacctgcaaaaatggtgaaaagtggcataagcaatgtcttaaaataatgtggtttcctgggaatggaatcagaattcaattactattaaactgaaatctgagaaatgtaagcatgttgtttcacaaattgtcttttactacaaaaatagttttttcaccttaaaatactttgattaatttgtatatatgtgaatgatctcaaataacaaaaaatgatcaacattcgcaaaagtataagcatcatatatttaatatattttattgaatttaggcttgaacatagtctggccacaatcttttcagaatatgacgaaaagtgacaagggaaaaagtcttatcttggccacggatttcacagaacaaaaactaaagagatgttactgctgtttctcctaccagatttgagcagtgctttgactacattattggaaaaattcaatcctgattaaaacttttttacatattttgcaaaattctttaaatggctatgttgacatttttcttgaattgaggtcatcttttaaaatatattagagatactgagtcacctctaacaatcaagaattaacttgatgtttttcaaactgagtgccattacataggtgactacctgtaataaatgttaatgcctcaactacagactttgctaaaaagaaaacctacaatatttggaatgtcttaaatgaataataatttaatatattagcattagatctgcacatttctagcattcatctaaagaaagcaataaaagaaacgtgtaggaggattttacctaaattataagaaagtctcccaaacctacctataaaatagttgtttacttaaaatatctttagaaatagtgattgacattttctatacgctaatgggtagatgtttcttgttactttcatctaaagagatgtcagttttaagttttatggaacaatatttttaaaatattaatattaacttataaaatggcaattttagtagaaactaaaggattattgtctttaaaaatattgataggaatatgattgtgttaaaatattttgtgttcagaatatgagtaatacatttattaaaaataaacattaatcaactagaggcaattaaattacttccagaaaagttgtttttgatagtgttttactcaacaccatagaaaaatatttggagagaaaataacattatgtataactataaattaatgaggtctatttccttaccatatggaatgagattttttggttttctatatgcctaactttttgactgatgttaggtcagattttaaaaagcacaatttaagagctcaggcctcacagagcttagagaaagagtcatagcagtaataatatagtatgagagagtacgtaaataggaaaagataacttgtgtttctgaaggagactcaagaaagcggagactgatgcagtttacaagctgtgtgaaattttttttcaaggaaataggacttgttctgctctttaaaagatgcggaatattgaggtggctcttttagttttagggagttactatggacaagttataattatttaaatgcaacatgcctgaaatgaagagatgtactctgttggattcaggattgctcatagtcctttctgtattagttactgagatgctggaagagggcgttggaggaaagacaaacacggaagggcaagaaaatgcaagtgatagggtctgatcaaaagcaattctcattttctggagaggaaggaataggaaggagtaatgacaatatcattgtgaatccttgttcttttatttagattaatttctttaccaatgcaattattttattcacaatttatagtttatgtgaatgatataatcataaaaatatataacattgtttctaattatatgtattgcctctgtatctacaaaatttggtaaaagctaattttctcagaggacagagagagaaaaacagagagaagaaagagaactaagggaacattctgaaatgactttaatagttaaacagctagttttttgaggttaaaataatcttgataaataatcattaatttttctgtcactctttttaaccctgaagaatagcttaattggttaatagcttaactctgccaagcctctcatcttaaaagcagaaatttagtgaaaaggcaaagtttatgaaatacttatttttttaaaatgtaggggggaaaaatggcaggctgtgggaggctaaggcgggacgattccttgagaccaggaattccaggctgtaattcatgtagtaagccatgatcatagcctgcgtgacagagtgagaccctatctctgaaaaaattttaaaaaaagacaaggttgggtgtgatctgttgagtacaagccattgacgccttacattgatttagtaaataaaactgaacatatcattcactggtagtaagaatagtgttaatttctgcaaagatgtttaatacttaatctccagcaaaagggaatgtacaggaatgattaatataaagatcctgagatggggagaatattctggactatctggataggaccaatgtaatcacaaaagtctttatgagagaaataggaaatcagaaaaggagataacaaagacagagcagaggtcttagtgatgctgttgctgcctaaaagggccataaagcgaaggggtagaaggtgccacccctgaaaaacgtaagcatattcttcattgaatctccagtgggaacatgaccctgctcacaccttgattttaaccctgtgagatgcctgttggacttcaggtctccagaactgtaagataatgatttgtgttaagctactaaatttgtgacaaatttcacagcagcaataggcaaccaatacagtgctaatcaaatacttaagttatattttgatatgttgcattagcagtagtatttgaaggaaatgaaaaatgtgttttactgtagaatacatcgtagagctcagagatgaactggagaaatgcctattttttttcttaaaggcctctaatcagagaaaagattaagtagaagtaagatcagatagctaataagttctagaatggttaaaaaagacctcactcaaactcttatatactcttagctaccacacgttcttcattcttctttaatctaaacctctaaagtgggttctccatacttatgtacatttgaatatgtttattgtttttaattgacagccttgcagttttacctttacaactagatctcaattgagtttgcacaaataacaatctccatatttcttattatttcttgtaagatatccatttttacttttttcccaaattgaaaccaggtgagaaaatattttaaaactttaatattttatgagaaacatagaaagggttatttttgagcctctccagctgcaataggaagattttcctgtaagaactggaatactaacatattctaaacattgaagtaagtacttcactggcaatgccaaagaagtcagttactgaatgatttttaaatgaaacatttgatgaatttattattgtattgaacatgacttcaaaatgtgctatactgcctgagggttttgtagatgttataattcactttagttctttgtattcctatattaagatcacagacttagcaataaataagactttatatcaaaacagctcccaatattatagtaagcatgagtcaaatataagaaaataaacagagtgagaacaggaagtatcaacgatgcttgaatttgtcatctgtattgatttatggagttacttgtataaacgtatcaacagtttagcaaaaactaaaccaatgcaggaaggtaagagtgtcaacagttttctggcacacttgagtcaggttttcacgcacagctttaaatatgatatacaatattctgaatattatatgcagtgatacttaaatatgagaaaaacatcaattctccttataaattattaaaccacatagaatttagtaaacttttcagatggttggcacaaatattttactttatcatacagattatataaatattttaaaatattatctattttaagattctggaatggaaaagagacattgactattgccttaagatgaagataattatctaattatgactttaatattcatgttcataaaaccaattaccttcaatgtatcaaccaagtatctgatggttattataggtaatggatctaatgattgctcttctgataatggcaatatcatagtatttttaattatcatttaacataataattaccacaatattgtgggctgaacaattgataaatacataaattttttcattaatttatatttacatttttatgctatttatcattctgaaatacttttattcagtcttgagattatgttagtaaagagacattacaatgaacaaatgaatttaatattcttccaggccaggtgcggtggctcacacctgtaatcccagcactttgggaggccgaggtgggcggatcatgaggtcaggagatcaagaccatcctggctagcacagtgaaaccctgtctttactaaaaatacaaaaaatttagctgggtgtgggggcgggcgcctgtagtcccagctacttgggaggctgaggcaggagaatggcgtgaacctgggaggtggagcttgcagtgagccaagatcacaccactgcactccagcctgggcgacagagcaagactccgtctcaaaaaaaaaaagaaaaaaaaattcttccaatactagcaatataactggtaatttatattggcttctgattttcttaaaaattccgaaagtacctggcaattaaagaaaatcctttgagcttggtttcactagcattaattttcatagtgaggccacaaagcaagaatcccaacacccaactttttgctgctcctcagatattctgatgactagcagtgaaattgccaggaggcactttatgagcacatgtctgattcactttgaatttattgtttctgttttgtttcctttctttttatttccttatgtttattgcattagttctattttccatcataaccctcctagttgggcatgtcaaaaagattaagaaagacagttcatttgtatcatttgctgtttatatttcacagccacacattgcattgaacaacatcccatagttcatttaagaagccatatgaaataaacctgattaaagactcagagaaaatgcaaacaggattggggcaattttcattattttactataatcttgtttgtgatttgttttcactcttgttcactgtcatgtgtaccagaggaaaattataaaggaaacaaataactaattattaggcaggaaaaaaaaagacagaaaaaaaattcagtcaactatgcatgttctcttcaaacatattctactttgcagcaatctgatgttgtctattttatatttggtcatacactccttttgaattctgtagattacttataataactgaatttcctgggagcactttaaataagactcttcaagtttgagcacttaacccagcaggctgatttgacagaaagtgccaattacaggtactagagaaacagatgggaagtatttgcctcaataaataaataaataaacactttaataatatgggttaaaataggggaagagtgatagctttggaattagtttgaattgtgtgcacactttaaaaaatattactgataatacaattagagcaaaaaaattagaggatgtagaaaataagttttttttttttttttttttttttttgagatggagtctctctcgctctgttgccaggctggactgcagtgacaaaatctcggctcactgcaacctctgcctcctgggttcaagtgattctcctgcctcagtctccctagtagctgggattacaggcatgtgccaccacgcctagctaatttttgtatttttagtagagatggggtttcaccatgttggccagactgggtctctatctcttgaccttgtgatctgctgacctcagcctcccaaagtgctggcattacaggtgtaagccaccatgcccagccaaaaagaagttttaacacatatgaaaaatctacaacaaaaggaaaagtctaaattaaataaggaaataataacgataatatttttaaagcatttatatatttttaaaatttatatctttcatacaaatgcagtatgatcatcagtcacctaatgagtttacagttactaatattgttcccatataaggtagaaaagtgtagaaaagtatgtagaaaatatttatcgaaaatctattcccagagggaaaatgcaaaaaaaattacataaaatagaaaatataggattattaattcatatgagataagatacttaagtataatatatacttcctaccaccctgttcatggaatagtaatactatgtaattatgtatatcacaacttataatagtgtaacctgaatggtgactacacacgtctgtggataaaaaacaatttatgttactcttatatcacagtcttccttttatttttagactgagtcttgctcctctgtcacgcaagctggagtgcagtggcacgatctcggctcactgcaaccacctcctcccgggttcaagcgattctcctgcctcagcctcccgagtcgctgggattacaggcacccaccctacgcctggctaatttttttgtatttttagtagagacagggtttcaccatgctagccaggatggtcttgatcccctgacctcatgatcctcccgcctcggcttcccaaagtgctgggattacaggtgtgagccaccatgcccggccagacagccttacatttgttatattttacaatgtatgtttagaaaactaatatattgagacaatttgtattcacagtaaaatatttgaaaactataaatattctttgtaccagagtctctgctataagttcaaataaatttagcctcttttgacaatattgatggagtgtagttggacacaaaatagtctaatctccatctgaacccacttaatagaggagaaaatgcaattgtgagttattcctatttgagaaaaaaatactttctaagaaatgaatcaatttataataacaatatagataacaaataggtagcaaaatagtgatatttgaattaaaaaaacaagggcttgtctaaaatacaaaatatgttttataaaattaagatttttgtattcaagatgatttaattactaatcaggttaacaaaacaattaccttaaatagaagaattgaaaagaatgtattttaaaggattatacaaagatgtatgagcagtgaacaattttgtggaaataatgagaggggctaaaggatgtaagaaaacaaataatgaagtattaaataaaaaatactttttggctaggtccagtggcttatgcctacaatcccagcactttgggagacgaaggtgggaggattgcttagagcccacacgtttgagaccagcctgagcaacatagggagaccccatctctgcaaaacataaaataattatgttttggtgtatggtggcaggtgcctatagtcacagctagttgggaggctgaggcaggaggattgcttgggcccaggaggtagagtctacagtgagctgtgagtataattttaaagtatgtgatgaattagggaaatattttataaatgtttatggactgcagtgccccttcgaatgttgggaccattattgcacttgctcatggggctaaaatcagcagtcattcagaaaaccaagcaagcaaacaaacaaacatcgcagcaatttaggtaaagaatgcaatttcaccaacctgatgaagagaatttgtacaaaactcaccagcttaactcccagctgtcaatcaataccaatctgccaatgtgtgggtgaacggttttgtaaatggtcctctgctgcccagctcacgtttcatggaacagacagattatcttctttgcgctcttcctaaattcaaattcatggactaaaatatgtgtatattttctgttgtttaaataggctaagttttaaggaggcttactactgcagtactgcttttgtaagagagtgccaagcagctggggaaacatgatacaagagacattggttttggaaaaaagaaaaaggcagaagctggaagacccttggggttagtattaaaagaagcctaaaaggcttgagaaaattatcagtaatggcttaacagaaagtaaaaaaagaaaatggaatctggaggaaaggaaacactttgtaggtagtagctataaatagaaaatagaaatgtacaaaataaatgtggtgatctagctaagaggattttcaggaagattactgaaaataatacctaatgtttgactgactgtaaaaaaaaaatgtgacaggagaaagatcaactaagaaaagttaaaactaatggagccaggatttgttgtattaaaaaaataaaaacactttctcatttcaagtctctccagagggaaaattatacttaaattaagaacagctctcaggcttaagatcaaatccataggaggtttaaaagagtatttacgaatgcatcatagcaagccacctcataaaaacctgcagaccagaaaaaaacaaaccaaagatcctctaagtatcttatagatgtatcttgtaggttcactttcttaaaacagtaagtctcagaatcctaacagttactggttgcagggagttcgtacaatcttgaaggcatgtgtgggttttgcttttattaaatcgagtgaatgataaatggatatacataaaggtcagaaatattgtaaggcattgtttcagcttggacaaaaggaacagagacattaccacttgtaaagaggatattgacataaaattattaatataacgaatttagatgagagatgttaagaggtgttattgttagagtaggaagataggcagatgtgagcagggcagcagagctcccccaacccctctcccccaccataaatgtcaggcaaccatcaggtgatggtcaggcggttgttaaactgtctctctaaataataatgggtcacagccagcgccagggaatggcagtctcccagtagttagaaaatactggaagctggtgatcagcaccttcccaataagaactcaggagctggacacgtgggctcaagcatgcgcactaaggggcaaaatgctggcgtttaactggttatatgaccttcctctgggaacacttgactgggtaagtgaaaatgcctcaaatgagcacgtgcataacttgagtaaacacactgtgtgtgtgcccctttgcaagttgccagcaggccactgcacatgtgaaccctaggaaaattcgagggaggagagaggtaatcccccgccccaaaacgtgccaacatataaaacctgaagtcaacggttgaacagcggatttggagctctcaagttgcccttttgtccctcttccaagtgtaattcattttgtttatgtccaaatacgttttaataaattctcctgctaaaaaacatgtctccggccgagcgcggtggctctcgcgtgtaatcccagcacttgcggaggctgaggcagaaggatcatgaggtcaggagttggagatcagcctggccaacatggtaaaaccctgtctctactaaaaatacagaaattaggccgggcgcggtggctcactcctgtaaccccagcacttcgggaggcagagacgggcggatcaggaggtcaggagattgagactatcctggctaacacggtgaaaccccatctctactaaaaatacaaaaagttagccgggcgtggtggcaggtacctgtagtcccagctactcaggaggttgaggcaggagaatggcgtgaacccgggaggcggagcttgcagtgagtcgagatcgcgcccctgcactcaggcctgggcaacagagcgagactccatctcaataataataataataataataataataataataataatacagaaattagccgggtatggtggtgggcgcctgtaatcccagctactcaggaggctgagacaggagaattgcttgaacccaggaggcagaggttgcagtaagccaagattgcgccacttcaccccagtcttggtgacagagcaagagtctgtcgggggcggggggagggtatccatgccttggctgggcgcgatggctcacgcctgtaatctcagtcagcactttgacaggctgaggcaggtggatcacctgaagtaagaccagcctgggcaacatggtgaaaccccgtctctactaaaaatacaagaattagcaagtcatggtggcaggcacctgtaatcccagctactcaggacgctgaggcaggagactcacttgagcttgggaggcggaggttgcattgagctgagatcaccttacaatatttctgacctttatgtatgtcaatttatcattcactctatttaataaaagcaaaacccacacatgccttcaagatagtatggattccctgcaacaatgacaggattctgagacttactcttcaacaaagtgaacctacaagatacacacataagatacttacaggatctttggtttgttttttccggtctgcaggtttttatgaggtggcttgctgtgatgtattcataaatattcttttaaacctcctatggatttgatcttaagcctaagacctgttcttaattcaagtataattcaatttcaaaaagagtcaacaaagattcttgggaagtttttcattaaaacaccttgaacccacctgcttttgccattctctggctcatagaatgctcacaaaatatggctgtgccaggtgtgatctgctccagccggaatctcagtttttgttttgtgcaaggggatttatgctttggtcgctttgttcattgtttcatgtatattgtaaagtctaggaggaaaatctctaccttcaccaataacaccctcatgacgcttccctttgctggacttgaatgtctttgtaactctccttcatgaaatcattcctaaacttttttaaaaaaatttctccattagcttggggaagggagaaaaaggaaatctcaaaacattcttcccctaagcttatcaattaccttcttcaaattcaaccaattctattctccagggaatttctgccaatgtctcatcttcctctgacataggctcttgaggtcattttgaatatcaattaacttacttttagcaaattctgtctagagggtctagaagacttctgtacaatagaacttagtgaaagttacatgtgtaattttaaaattgttagtcacatgaaaaactgaaagagaattaagtgaaattaattttagaaatttgttttatttaattcataatacctaaagtattgtattcccacgttcaatcaatatgaaacattattgatgatatactttacattctcttgtgtttaatttacacttacagtgtgtaacttactagtctttagttagactagtcacatttcaagggctctatagctacaagtgactagtggctaccatatttaacgggaggtttacaaagacttcctcaggttatgggttggtggtggtgggggcttatttcttatactctcaggtttcagataactaccattcaaaatcctgatgaacatgtaatgcataattgaaggtacgactcagtcatcatttccacttatttcaaacttcatcaacaaaagaaacaatattaatgctgccttaagtatacagagtggatcagatcaatccctatattaactgaccctccatttgatcccttgaaaatgtgaaaataaatcaggagcaaaatgtccttacttcatgccaagaaggttacaagtaaatagatcccagcatattttgtatcatttaattatagcaattgatgccttcctgaagtatatcatgttatctgtcaatgtattcatgaagcactcccatctcatttacaaaccatcccttgcccagatggctaagcacatctaattatcttgaataataattttagatgtcagagttttctgacctttataaaaattaagtatactcatcttggttctccctactgaaaatactctgaatatatagttatatataggcttaagataataagtttattataattacatatttgctcagtgtaagaggactatttaagttatattattttacccaaatcattttgttaaaaaaaacctggggtacatgaagtctattagtcaactgtaaactgtaaataacctgaaatattaatgctttgatcatttttaattttgatgcaaaacactatatgtcattttatatgtatttgtagttttcttgtgttcataattttctcatattttaagaatatttgtgtttctatttcagttttcaaacaatcattactcatatttgttgttacaaatatttacaatccttaagtgtctactaaaatcactaaatgtttactttgtacatgtgaaacttgtaaagtgctgcaactagttatgtatcaactggggacttgattgttatgtgatgaaaattttaaaaatagattacacagaaatttcttattttttaaagattttcttcaatcagtcaattatctatcatcaatcccttctaattatatatatagctgaatgtctatatacacatatatagctgattgtatatatacgcacatgtatatatacaagtgcgtatatatacacacatatacacatataacacatatataatgctttgatcactctatagctcaaccataataaaattatatttaagaaatgtgctaattcattcatcaatattcaatatcacgtatgtgtgtatgtatacattgcatatataatacatatacacatatatgggtatatatacattcaactatacatagagccagagtaagtgagagaagtatgtgaaaacatattcatcagtttttggggggcaagatgataatattgattaagtgacttttttgttcatttatattttacttttcttaaaaaaatcaagaaaatcatataaactatctcaaataatattcttttatgatatagtatcagatgagttaacatattccctatagttatacatttatcttattcaaattaattttttattaaatatacaaacctgaagacataattgatgacaaatattatttgcttatttccttatggatgtttggatatctgcattctgtttgtgacacaatgcattttacttggttccttgatgtcaaccaattcaaaaattgaactaacatccagaaaaggtagatttttgattaatctacttaattgataaattacattaaaagcaatattaacaaaaaataaggccaatttgtttgaagacagttgtaatgaatacataggagtggaaggtaaataaacttcagatttacaatcaggaattctagatgaccataagctgcttactggacacaggtggctgttttctcaggagagcatttcataataggttttaaatgaggaaatgggaatcattagttttagatacttttgaaatctcacaagtgtgaaaaccttcatacatcataactgaaataatgagaagtgattaataaatgtcattgacttaaatgagttgccagatgcatctgattctcaagtgagcaggaaaaataaaatgcaaaaaagcctcataaaatgtgtcataacagtttgtgataatttatgttaaaccacagagatgattcccatttccaaacataatgtaattttagaaaccaaagttatttatttgtagaatataatcaaattatatgttttaacatttgaaaaattgtatttttcttctgccccaaagtaaaattagaaaaaaagacgacaaaaatatggataacatgtaaaaatctctcatttgagttaacaaggaatagaatggattatatatgtacgccatttaaaataagtagactaaaaaataatacattacgagaagttcatctgttcggtgaggatgtttttaaaatattaatttatccagctactcgggaggctgacgcaggagaatggcgtgaacccgggaggcgaatcttgcagtgagccaacattgtgacactgcactccagcctgggcaacagagcgagactctgtctcagaaaaaaaaaaaaaaaaaaacaaaaaaaaacccacaagtaatttattagattttattttaaaaactaagaagcaacttagttaataagctatgccatgatacatgtcattggacagtcatttagcaaagttaaattttagaaaatcgtgttaaaagagcaaatttttctttttctatgagaaacttaatttctggcaataattcaatattttaatcatttcttatgaatcttttttaaatctatagaaattatatagcccatccataacaaaattatatttaataaattatatagcccatccataataaaattatatttaagaaatgtgcaaattcattcattttgcaaatcagataaattttagcctcatgccaaataaatattgagtttatgttctttaatataaagaaggttgtagcatttaaaatatcaccaaagatatacatattatatatattatataatatataatataatatataatatatataacatataattatatattatatattatatgtataatataatatataattatatgttataatatattattatatatttatataaatatatataaatatataatatataataatataatataatatatatataatataatataatataatatataatatatattacataatatattatataaagatatataatatattatataaaatatataatataaaatataaacattgagtccatgttctttaatataaaaaaggttgtagcatttaaaatataatcaaagattttattttattttttattgttggtgctaatggaggttttctaattatatctgtcttccactcctaaagattctgatttataggtctaggggagtgatctgggcattagaatattttatatgctctatggcttatttaaagtgcaatgagtttgagatgcactctgttacttggtattaatcaatatctccttgcttaaaaataacctccttttattcattcatcatatgtgcatgtatgtatttctgcatatctttagaatgcattaagtacaaggcgctgtgtactgtgaatagcataaagtgaaataaaataccttcttcttcaataatagttttaaaactagcaggaattataaaattatttggtaattttatctactctaagtgttaaaaatgaataactctgaaatctattttttcacaacaaaactggcttttaaaattttatttactgattaattcatgagtatgtaactgaaatattctaccagcgccctgaactcaaaatgccttaagcaaaactgatgatcctctttcctaaattacttattccttctgatttctctatctctttcaaaggagtgaataaactcttcttttatttcttcctttgggctggctggaatatcatgatagctgaagctagaggagctgctttgaatgaactggtgtttaacagaaacaatgcaccaagaagaagctgtattctctatacttttcagcaacatgccacctagtttctcatttttaaagtaaatcatctaaaaatcccatttaaccaaaattatttgttttttgttgtccgattatttaagcataatcagaaccagtatttattgagtgctttttgtatttttggcacaattctttacctacaattaatcttcttaatttgcctaccagcatactatgtgccaagcaaaaattccatgcaaatttctataaccatgaaccttagattttagttgaaaaagatagaaaataaataataaacttatgtcagataatgaaacatagaatataatttttatttgtatgaccttatgatagattatatatgtgcatttatatataagtatatatttatatatatacttatatataaatgcatgtatataattgcatatggtagaattatatatattttcaagcaattctatacttttactgtttaaataaacttaatttgatgctgtagaaagaaatgtgggttaaacctcaattgtcaagttaaacctcaattgtaaggtggatgcaaaggtggatttgctgaaacttatttgcatatggagtactatgaccgaaatgtgtcccccaagaagcaagtgttggaaacttaatccccaatgcaatgctatctggaatttggcctaatgaaatatgtctaggtcataagagctccaccttcataaatggattagtactacttttaaaagggtttaagtctttgagtttaatcactttctctcatgtgttccttctgtcttgtccttcttctttctaccacgagatgatgcagcaaagaaggccctcaccaagtgtgggcctcttgacctattactcccgacctccagaactgtaagaagtaaatccctggttttacttcttttgtgtgtgtgtgtgtgtgtgtgtgtgtgtgtgtgtgtgtgtgtgtgtttgtttgtttgtttaagacagggtctcactttgtcgcccagactggagtgcagtggcacaaacaaggcccactacagcctccaccttctgggctcaagcgatcctcccaccttagccccccaggtatttaggactacaggcatgtacaccacactttgctaatttttgtattttttgtaaaaactgtttcaccatgttgcccagactagccttgaactcgtgagctcaagccagcctccagcctctgcatcccaaagtgttgggattacaggtgtgagctactgcacccttacgtttgtttgtttgtttaataaattaaccagtctcaggtatactatcacagcacaaaatgggccgagacagaaaattggtactgaacaatgaggctgttggtataacaaatacctagatacgcggaagtggtattggaacttctagcctctaatgaatagaggctagaagaatttagaggagcaggctagaaaaagcctagactgccacaaatgaagcagtaagggtgattctggtgagagctcaggagaagagaaaaaatgtaagaaaattctggaatttcttagatattaagtagtaatgatcagaatgctggtagaaatacagataggaaaggacattctaaagatgtttcagttagaaccaaggaacaaggtattggaaactggaataaaagccatcattatatagttgcaaggaacttggtgagattgtgtccctgccctagggtgttatggaaggcagaacttaagagtgatgtacaaggatatttggtagaagaaatatctacagagccaagcacccaaggtgctgcctggcctgttttgtccacttgaagtaaaatgagagaagaaagacatgatttaaagatggaattgataattgaaagaaaattagaaagaaataattttggaaatgtttagcattgccatgtcaagaatgaaaaggcatattttggataacaaactttatgtatggccaagcaatcctttgccaaagtgccacagatcgaagagatccagataatattcatcaaaacaatgagggaaaaatctcaaaggcatttcagaaatcttcaaggcctctcatcacaggcccaaagcgtgaccttgaggtcagggtttccagagaggtgcccatgggacctcagcatttgctgccctgcaccacctccagtgtctgctccctgcatattggcacaatgctcctcagttgccattgccacagctcacgtgggcccaggtgcagcttgggcaggcactccagagggtgcaggcaaggagccttgacagcatcagagtgttgctaattctgcaggcacacagagtttgggagctgtggggctttgacagtcttcacttacatttcttgctttctttttgttaaggctactcaagtgaagcagtagaagtggacaaggaacaaaaaaatctgtaagttggtgtggtcaattagttgtaaataaccctgtactcagaccagctgtctccgtctaaattttaacatatgttgcagacagcctggtggcataggcagaaacttgccacaggagcagagctgctacagagagtagtgcctagtggatccatgggaaccaggccaacatagtctccagtagtctcctccagctcctaatggggctgtgggagtgggaccagcactaagaccccagaactgtagagctacaagcatgcaatgatagccagagagagccgctggcaggagattccaactcagagagagctgtggcatgggctgagccataagggtaagcctgcttgaggctttgggggccaaactctcttgagtctacccagaatgtgggatatgtagtcaaggaaaattattctgaagacttatgattcaatcctgtttggcttattggatttgggacttgcttaggacttattacctctttcttcttgctaattttccccttttgaaatgggaatgtgttttgctattgtatttttgaaagacaacttgttttaattttacagactcacagctggagaaaatttgtgtcaagatgaatcatgttttgaatcttctctcatgtcagatttagataactgtttggactatggacctcttagttgatgctggaaagtgttaagattttggggactattaaggtgaaataaatgtattttgcatgtgagaaagacattaattttgggggctgtggtggagagctatggcttgaatgtgtcccctaagaagcatgtgttggaaacttaatccccagtgcaacagtgttggaaagttgggcgtaagaaaagatgtttatgtcataagggctccacccacatgaatgcattattactgattgttaaaaggcttgaggctgcaagtttgatctctctcatacacaagcatatgtggtttcttgctcttctgtctttcaccatgggatggctcagtgagaagactctaaccagatgtaggcccccttgactttgaacttctcagcctctcgagctgtaagaaataaatcactgctttttaaataaattatccagtttcagatattcttttgtagcagcaaaaaatggactatgacatggagctttaagagacatctgataaaaataaaatttaagtgaaaacgtgggcagataggatgagaacctgtcccatgaaaaaaccctgtgtagtcactaggtgagagaagaaattcagaacaccatgtcttcactctatatgtgtacatcctagagatgaagaattatagattaaaaaaccaaaattactatttaattattttgtataacaaaatgagacactaccatcactttttgagacacttatatctatgtcaaccaaaaagcaaatcccaatttttcctccccatacaacagaccatcacataaactccgccctgtgagggcccaggccatctaattacagcattgcagctatcacaactaagccaagtatctcaggagaaaaaaagctacctgtttctagccacacaattaagccatgtaaacacatgtcatactttgtgtcaaagcagtgatagtatcagttacttagagatgaataactggtgcttgggactggagcagccttgagacaagaatatcactcatcagtcccaaagaaatggcagaggaggaaccatggctggaaaagcagacgctatagtggaagacaaccttttaggcttcctcaaaagcctggagttggggtatcttgctggtaattgaaattcctatgtaaaatgttggaataaagaataaagttaatttgggtgtgttctattttttccacataaacttgcaagttagacccacagtttttgcttatgtatcaatgttataatatgctactttaacactagtgctagtttattaatcctatgagttcaactgtgtaattttcatttttttgctgtgttttgtaggattttatgtagtttaatgttttcctccatatctgaaataaaatttaaaaaagtgtgcttgatagtttagagtgctttctttaaatttttctcttaattgctgttcatatttcttctttgatagatatgcttatgtttcgtctaaaagttttatattttagcacatttgaagattggcttggctcttcttggtctttagatatccatataaattttttaatgaattcatcagtttcttcaaataagcaaaccaggattttaataggaattatattgaatctgtgaatcaatttggaaagtattgccattttagcaatattagatttccaatccataaacattgaatgtcacttcacttattcaggtccttaatttctttcaaatatgctttggaatttccagtgtacatgtttatcctaagtatttcttctttttaattatattgtaaacacgttttttaaaactttacttttggatttttcattgatagtttacacaagttatttttgaatattgatcttgtttctggcatgcttgctaaacttctttaatagttttaatttattttttgcctatacatgtaaatcccctgagattttctttttttttttttttttgagatggagtctcactctgttgcccaggctggagtgcagtggcaccatctcggctcactacaagctcggcctcctgggttcacgccattctcctgcctcagcctcccaagtagctgggactacaggtgcccaccaccacgcccggctaatttctttttgtatttttagtagagatggggtttcaccgtgttagccaggatggctacgatctcctgaccttgtgatccgcccaccttggcctcccaaagtgctgggtttacaggcgtcagccaccgcgcccggccgagattttctataaacaagacaatgtcatttgtggaaagagctttccttctttctttgttatcttgatgtccttcatttcattttcttacctaattgccctgagtaaaacattcattaaaatgttgaagacaagtggcaagcgtggacagcactttcttgttcctaaacttaggggaaaacatttcagtctttcaccctaaagagtgatgttatctgtgggttttggtaattgacctctctctcagttatgttttgtgctctacttcaggtggaacttgtcccacttcattgttggggttccatgtctagtatgctttggctctgtgtccccactcaaatctcaccttgaattgtaataatccccatgcatcatgggaagaatcaaatgggagttaattgaatcatcgccgcaggtttgccccgtgctgttctggtgatagtgaataagtctcatgagatctgatggttttataaaggggagttcccctgcacacactctctcttgccatataagatgtccctttgctcttccctcttcttccaccatgattgggaggccttcctagccatgtagaactgtgagtcaattaaacctctttccttcataaattacccacacttgggcatgtctttattaagcagtgtgagaacagactagtacaatgtccttgattgtcctgttgatatcacatgaaaccttcatacatgtgattcatatcagtttatatttcttcctgttctactccacaatttcccatttatccacagccactcttcaacacatctgcacacctctttcagggacaggaaaattttatctgctttctgccaccatttgcaggctggaagtaagtgtaggttgtggcagttggatgtaggagcacccttatatgaggacagattaataaatattttcttttggtagtaatattttgttttattgtctcatgattgaatctaccatgctgccatgtttactttggtatggcatgttttacccttgagacatatattctcaggaactggctgtatccactgctatatgctgaaaggatggcacaaaatgtttacttgaacatcatatttctcaaaggggattaatttaactctcttacccaagagtctgcacacaaaggaaaagggagggcccagggcaacacacactgttcagccctcttcatttttaccagtttaaatagcatcatttaaatctggagatgaggttaggagaagatgaaaacaagtacctaagctgtaacttcctgcacacacatgcacacacacacacacacacacacacacactacatatatatatatatatatatatatatatatatgtatttgaattagcttttaaattcattttatatttcaatggatttaaaagctaagaacttaccgtgtattttcctctcttctttggtgtcattctaacgccttccctgggaggtagttatctgccttaatgatggaatacaggaagatggggtagaaacaatatcaataacacttcatctctctctctctctctctctctctctctctccgtctctcctctctctctctctgtctctctctctctcacacacacacgcacacacacatctccattcacacttactttcataaatattttaaagtcaatcttgtctctggtcctggaatatgagacaaacactaaattttcctttagttgtgattgaaatctaagtttacagttacttttgaataatttgtttatattatttaccctgaaacttaagttagctttatataagataaagaagtctccagaaataccaccactacatttgggcatttatgcctagaaccaactatgaagcaaaataatttctatgctatctgactcactctgaggtttacggaatttttttcttctacttatttttatctatattatcaactcacacctcaaatgatgtgaaggcaccctatttgagaatgaaatttcttgaagacaattttcccacaggatatttcaacatggaatcgtctgagcaactatatgaatataactattactttgagtgatgaaatgcctgataggagcaaaaagtatcacaaaaatataaccagcagagagagagagagagggagaaaacaaccctgtcaaacacaaacgcaaacacacatccaaacagtaaatccagattttgttgaatgtaattgtggcctcaattgaagttgaactcagaatccctcacaacccgtgaagacggaaggttgcctttatgaagtatttgtaaatacttggtaaagctaaaattcatgtgagtattttctcaaaagatggaatttcatctaatagctatatattttggaagacaaaaatactagtatcaggattgtcatttttatgttgccttgtcataaaccataagggaaattctcttgcttactagtgattaaaataaaagtcctttaagactgcaaatgtctctagtagaatacatctgtactttgaggaaaaaagaagtatatttacattgtacaatttttttttttttacagtggaagtatattctttttccaaagcatgttatttcaagcctgggactggagaaagtgtaactagattaacattattagtttttatattaaatttttaaaaattaaacctgtgtttaatccttctaactttatttttaatcaacctatccaaaagatctggttgaacatatgttatgatttgctcatttttgttctacagtctttattccttatagttctttctgtaatttctgaagtgaacctcctttcccactggtcttgctgtcggaatccaacatcatgataattacagaatgagtattcaatgcatatttattggtgacaaaattcaatgagataacattgccacaatttgtagataactgttttcctaccgcattattatggtattaatttggtagattttactgtgattctgactttaaatataactcaaattaataaataacattttatttccactattactaggcattaacaattttttacagattttatttacaacatcatcattgctctgtttatatttttttgaggaagaaaccacatttataagtgctttgcagctaaaaactattagaatctataaaaattaccacaccacaagattagattagctagaaaaaggcaatctggcactggaatgaggcataatcacataactatatttcacaaagaagatgtctgctagggtgttgcctggggcttccttagcattttctttgattcaagaacagctttttttttccctctagaaagcaaaaacagacatttcatcatagggctatgggatattggttgcaatttccctttcctagaatttcattgttgatgtttccgtattcaccctttcagtcacatacatgtggatttggatgtgtacaatatgaatacaattacattaaattaaatacataacacacacatacatgcatgcacacacacatccacatatacacacacaggggcatatacctttatgtgagatgctttccaaagactagcagaacctgtttttttttttaattattcagtcatgtttcattttacttttctgtcatgaagaaatctgattaaccttgacactgacccttcacataatgaagttcaagtttttgaacttcaactataaaaacatattttaagaatgaatagcagtgctgagacactcatatcttcccagtggctcttcctggctttattatgtgataattatctgtttcttagataaacctcactttctttagacaggctaaaggatcatttttattctctacacttttctatcatggtaggaataggctgaataagtgaataaatgaactaatgaataaaaaaatgtgcattaagatctctgggttcagaaaatgagtcaagctcaattaggaccagcaaaaatgttttagttaatcaaaataaaattagagcaaaaaagtatccaattcagagagttttttatgtgttctttacatttgtttgctttttttttttttttgcctgcgtatatatgtgtttgctgtgtatatatgtgtttgctgtgtatatatatgttttgtgtgtttttaatcattgtagagcacacagtggtggtattcactgacatgcgagtcacaagaaaggtgaataaaatgaatgatgaatataattaagttgttattctaatgaagaaacatcaacattatttatttcaaagtaaaataaacacgtttttaaagagcatacacaaatacaataatattatttttgtatcaacaatttgtttttcaaacagtgcatttttcctggtcatatcataactaatgtggacctaatcacagacgtatttgagaaagggtagaaattaaaataagacaatttccaaaaaaaaaaaaaccagtaaacctcaatgattcctttgtgtgttttcttgtatctggtccaatcaaatatcgtgttgtttttctgtttttcagtctgattatacagctaacgccctgccggtaaataaataaatacaagtactcagtatgcatatttatgagcagatatcaaaagtatttgcattttgtttttataaatctgattcagaaaaatataaattgctaaaataaaaagggtctagatatagctcttcatttgaaagaaagtattacaagttttgttttatagtatttttctgtttaaaaaatattataaaaaataaattccaaaaaaacccattattttatttcataagaaaagggtaactgcatcgtttttactaatgttcataaatgagattttaaaaccaacaaattatccttcatgtaaaatattttcatataaataaaagcttttgtcatcaatgctttgctccactgaaatggatatttttatatttctgatttaaattggaagtaatttaattaaatattgaaaaaataagaaagacaaagaaggacagaaagagacagagaccagataatcaggaaacagggagaaagaaagccacataggtaattagagatatttctgactgggcttgcttatccaaattacaagaatgatttcagcaatggaattcgaagtgttgactgactcaacttcataattcatctattactctcctagaggccattagaatagcagtaaaatgacaaagatatctatgtgctgatcagtcttcaaatactgtagtgcctatgttttcttacctaggagctttgtgcaaggttgacagttacaggcattctctatggcaaccatagactacctcggtatactgaagagctctcagattccatttttatttcctttcagaatctgtagtaaacctgttaactctgaagaagagtttaaacagaaagttagggctccaagtaaactaaattaaaaaaaaaatttaatcctcaaagatttaagagatgtctaggaagtttccaattaagcatgttcccaaatcgtgaaacctctgatggacctgtaacatttccaggtgcatgatgcacctattatcatgcacgtatgatttttctgttgattattgatggaagatgtggatgtgtctcacgcatcctgcttcttctatatatgcaaaatactgtgaatgtagaatggagaaatttattctggaattcagtgtggtcattcccacaggtgactttacagaaataaaatctaccctgattttctcagcaatgatcaagccaaatttgaggcatataagcagtcttcaacatgaaacctccctaaaacatcttaataaatgaaaattcagtattttaagtgattagatgacaaaccatttattctttctgcaagttctttccagggtgtgtatgtgtgagggaaaggtaggtctcattggtattttcagtttaacaaatagcagtaattatgctgcctacaattttattgagaacaatgaaatgattttaatagatgaacaagcaagagattttagagaaaagtgatcactttacacagcggatttcctttaatctttctaacatatgaattagctagcattttaatctacattttcgcataattttattttcacataaaaatgtagattgctattgacattttcacatagcattatgttaattcatatggaaattgaaatctgggagttttaacttcttttttctgtttttcattatatttcaacatattcaaaattttggttcattggtgctttgccactttcattaataatttcctctggtacaagaaaaaaaacttagtaggtaaaggtgagataaacagcaataaaaatacaggttaagaataattaagagttacctaagttcatctagtaactaagtagcttgccaggtttctgaaactagacaagcaggcttacatgctaacacacataaattctacatcatattgttgctagcaaaataaaaactgagtagacacaatttttattttattttagggtatatctgccataatgcatatattaaaatgttatagttgataggtcaaaaattgatctattcataatacgtgtgtgtgtgtgtgtgtgtgtgtgtgtgtgtgtgtatctcataggaaaaccggtgaatgaaactgtggctctcaaagttacggagagtgagaatgtataagtcccccaaatcccttgcctttctggtaaaataactgaggcatattctacacagactctcagtggcgcccagagggatgaagccacagctgctctcacgaggaccctgcttattaccacatctcatatttcatcccttccctctgctacttcccactcttctacaagtgcttcctgggatcccttcctgagtaagctatatacattttatatatatataaaaggtatatgggtatgtatataaaatgagtattaaaatatatagggctcctcttcaaggcattgagaatcaaagtaacataaaacctcatgtgataaaaaagacattaagcaattagatttttcctttaagtcgtaaactgttcctctgtcaaagggaaagtaggaaacactaacttgccctaaaactaacggagactctgaaacctaatgttatagtctcttctctttgctgactacacaagatagtcagaaaagaagaagcagaaaatattaaatccatgtagctaaacataatatgcttgggggtggagggcagagaaagagcaggaggaggactggttataaaaataagtaatgccaaagtgtgattttgctcctcactaagtgtcaagtattctaggctctttcctgatatttattgtaaaaaaaatactaaatgtaaatgtgttgttcaagacctgattcccattaggaaatgcaacactcaagctacttcatgatgatatggaagtagcttgctcaggaagggatcccgggaagcactggtagaagaatgggaagtagcagagggaagggatgaaatatgagatgtggtaataagcagggtcctcgtgagagcagctgtggcttcatccttctggacgtcactggagtctgtgtagaatatgcctcacttatcttactagaaaggcaagggatttgggggacttatacattctcactctccataactttgagagccacaatttgattcatcaattttcctatgatcaacacaagcaggaccccaacagcatctgccacagagactgtcaccttttccctcccatcacctgattctcccacatctacctatctccagctgggaatatacgttgtgatgtaatggagaaggataatttaattgtaacaaacaaggaaactttctacaaagagctttttcttcttttactttttttaaaataaattttattgtgtatatttaagacatacatgttgctatgtaacagatagataatagatagatactaaaatggttactacagtgaaacaaattaacatatccatcatttacatagttaccattacccattttttggcttgttttttgtgtcaagagcaactaaaatctacttatttagcaggaatcccaaatatagtacagtttttaaaaaatctatagtcctggctggccgccgtggctcactcttgtagtcccagcactttgggaggccgaggcgtgtggattgcttgaagccaggagttcgagaacaacctggccaacatggtgaaactccattgtctactaaaattacaaaaatcagcagggcatggtggcacatgcctataatccccactgcccgggaggctgaggtgggagaatcacttgaacccaagaggtggaggttgcagtgagccgagatcacaccactgcactccagcctgggtgacagagtgtggccctatctcaaaaaacaaaaaacaaacaaacaaaaaaactatagtcctcatattgtacattaaatctgtatatttgttcattatacgtatctgctaccttcatcctctaatctacatttccctatttcccgcacctttcacctactcctggtaaccaattttattctctatatctgtatatttgaccttttttaaatattccatagataaatgagagcatacaatatttttctttctgtgtttggcctatttgattcatctttgttagggcaaatagcaggatatctttttttttgttttcaatgtattccatagtatccgtataccaaaatgtttttatcaattcatgcatctagagacttttctgttgtttttgtatgttagctattacgagtaatgatgcaatgggcacaagatggcagaaatttttatgaaaattaaattaaattttattttctttggatatagacccagaagagggattactgggtcacatgttagttctattttcaatatcttcaagaacctccatactgttttctataatggtgacaccgatctatattcccattaaaagtgtacgagtcccttttctccacaccataagaaacatttgttatcttttgactctttgataatatccgtcctaacaagtgcaaggtagtattccatagtagtttgatttacatttctctggtgattaatgatgttgagtaccttttcatatactagtggattctttttatgtttctttggagaaatgtttattatagtcttttgcctatttttaattgataatttgtttttccactactgaaatgtatgagttatttctatattttggatgttaaccccttagcaaatatatatggtttgcaaacattttttcccaatccataggctgaagtttcattttgatgatagtttcctttgatgtgcagaagatttttagtttgatttagtagtctcatgtatttatgtttgcttttttagtcttactttttggtgtgatattaaaaaaaaaaaacaacaaccatcgtcaagactaatatccaggaccctttcttctatgttctcttctcatagtttcatagtatcaggtcttatgttgagatatttcatccaggcccagtggcatattcagttgttatactgtaagattagtcattcaaacccactcacttttatgtataaaagtggttcttaaataaagtttctaccccattattctatcttataaaaatataataattgaagtttattttaaatgtgacttaatcaatattgttgcacacattattattaaggaggatcaagtacattgctatctgatgaacagcaaaaaggaaaatgactttaaatatagataagcaacaaacaacaaagaatcttaactaaatagcacataaaacctcaactattatatgcacacaggtacgtaaatacatatcaacgcccaaacactgttgactcattttagaaatataatctcaacgtaacataaaaccgagtaaaaatagattaatattataggaagactgagcatcatagacaagaactcaatcctagattacttgaaaaatgtagtattataaaaacagttgtacgatttacagaatggtagtttgccagttgctgttgtctcttccagaaatatttgttctgatgtatagcagcttgtttaaatccaagtatccagtggtactcaattagtgactttcaaactccttgtatatgatccactttcaccaaaaatggcctatgtttcctacagaagattattctctagtattaggtcctcaggtactgggtttgctttatgaatacggaccaaaaatattacatattattcatgataaattggttttgtttgtttggaaagttaaacagtcagagaaacaaatggcagcattcttgcttcccaatcattgtagaatttatccaataagacaagagcatagtggccttgcctgtaaacttcaattatcagtacaccaacattggaccaacccccagagagaccaaatattttacactctgacacgtactcctcttctggcaatcagttttggctgacataatgaaatacagttaatccatgaacacatggaaccacagcagttaccttgttcaatcatgcctgtaacaattcaattagcaaatccccatggacattctgtacctcagaagaattatccagggatatttttactatgcctgttttctaatcacattggcaaatctaactgtttgtacaagagaatatcactgcccttgccaagaggaagggtcaaatttattaacaatcccgtatgtctacattcataaattgttatttcacgtatgtgatagtgattatggttaagcaaaggctttaaatctttgctagagagtaatagtcaagatcgtgttctttttgtctactcatcccagaatgaatctggcagaaattgcaaacaattaccaggtcagaaataagccagatttataaattaagaaatgagagtccacagaaaggttaatatgaacataattattcacgaaagtctaaggtaacaagtcagtaagtcaatgactcactgtggtctaagcacatgaaaacggatacacaaaatggagggttactttaaaaacaatgcagatcccaataatatagttcaacgccttcaaaactatacaagaaaaggcaattatctgcagcatttatttttcctgttgactaaaccctattgcagaaattaaaataggtctgtttaatttgtattggtgctttcagaaaataaataacaatgttagagactagtattattggatatatattgttcattagcacaaggaagaatagttatttcacacaaaatttatccatttcacaaatttttctttttaaatagaaagagtaacttaagttgctgttatcaatttagtatcccacaacatttctgacttttataaacaataaaattatatgtgttcttgtcacccatttatttatctttcccatatgtcgcaaaacatgtctggagagaaagaaacagccacaatcagagtggagctcgaagaaagtagcaacttttcttttattctggatactgttaagtccttaatttttaattttactacctttaaaaagcaaacattttatctgataaatagacttctaatagacataaagagccagatttctaactatccggtatttcaaaatttacttcaaacatgttccccaaattcttcatttagagaacaaactcaagcatcatttatacctgcatgttaagagatgaaattagaaacaatgtgactcatattacgtgactaaattattttggagtggaaattactttaaactctaatttcttctaatcaaatagtccagtgctttcgcagagcactccatgccatttaattttctttcttagtgttttaagatgccattgttctctgactttcattatcaaagaaatgcctacctttcccaaactcttacagaatgataagaagatactcctcattttgaacattttctcttgagtcacaggccctgcttgacattcttcaagggtccggtgaatctcctctgtttacatgtgtgtgtgctgtgtgtacggggttggaggtgggtaagatgaacagagagagtgggagagagagaaatcttccctaagcatctttatctgcaaatacttattcttctaaaccctttgtcaccttcactgcttagtaagcttcacagtacataaaatttcaagctggctctgtgtgtgtgtgtgtgtgtgagtgtgtatgtgtgtgtataataattcactttctacatatattttgttattactactagattcaacttttaacttttcttacgttcttaggttgttcaaacagcagttagcacaatgagtttttttttttatcctaggtgcttggtaaatatgactcatttgagtaatttttaggaatggtaatttttctatctgactgtcgcaaccccctactctcattttttccatttatgaaaagagatatttaagtaagtgttttgtcgatcccaccacactggtaacagaggaccccgtaacatcagctgcaccattcagcacactcaggcattattttcaaatagaatcataaaataggcattcatgctccagattgtccagataagtagtgggattggaggcttatatggaaaacacagtttgaaggattgggacaagttccctgaggaagaataaagctgaaagttatagttaatcaaagatgaaaatgaaaatccttagtgttaacatttctaaaatcaaatctttgcatcactggtactttgggtatgtgagttttcacataatttttgtttactaagtgaattggaaattaggttagttattactaacctgatcatcagttattactaacctaaccattattactacataaagtttatgcactaacttaaggacacattgctagtacagctttttaaaaaatattttaccattttattttgaaaggattttagacttatagcaaagttatagtaattttacagaaagtgcttgaatggcattcatccctcttcctctcatgttaatatcacatgtaagaattgtaaacctaagaaatgagcaatggtaaaatactatcctctaaaccacaaacttatatttggattccattacgattttcactaatatgattttctgacccagaatttaatccaggatcacacaatacatttaatggtaatgtctctcattttcttcaacttgtgatagtttttttttattactttgacacatttaaaaaatactgttcaggtaagtttggaatatctctcattttttatttgtgtgatattttattatcattagtttgaggttattcatttttggcaaataatgtttattcttctcctcttagcgtatcatatcagatggtacctgatttcgatatgccttatctgtggtaacccatattgcttggttgatagtgactgctagatttcttcatcctaaatatattattctggcttttgtactttgaaagaatgcaatattctattccttcttaaagttttacccactgattttagatctattgctacattttgccttataactattactactattgatgttcacctagtggtgattctatttttccctcatctcttctacattgattagctgaaattattctgtaaaacaaacaaacaaagacaaaaaaaccttctttatacctatattttttctattctcatgctgctaataaagacatacccgagactgggtgatttataaagaaaagaggcttcattgactcacagttccacatggcttgggaggcctcacaatcatggaaaagcaagaaatgccttacatggtggcaggcaagagagagcttgtgtatgggagctcccatttataaaaccatcagatcttgtgagagttatttactgctacaagaacaatatgggggaaactggccccatgattcaattatctccacctggccccacccttgacacttggagattattacaatttaaggtgagatttgggtggggacactgccaaaccatatcaatacccatttagttatttatgccagaaaataaagtctgacctctattttgatgtatatcactgacttctttttgggcctcacctctgttctcctgtggctccacatatagacaggcagataagaaggcacatgagcttgcacttcctggaaattcaaatcttctctgtgggaactttttctcagtctcacaccttagtatcataatgacataagagaggctaactttaatacccatagaatcttaacacacatattataaagctgaaaacatgttagagaaacaccacattgtagtagcctgtccagttttcttgaatcaattatttatacatttatttcataaaatataacgtatttatttattttctttttaaacagtttttatttttaattattatggatacataatggttgtacatatttatggggcacacgaaatattttgattagatacccactgagaattttatttgaatttttaaccccattacttacatatataagatcttccaataatgtggtttcattcaacattgtttaattataacattgataagaaacaacttgattcctgatggctaaggttactatctgtgtggagtttgcatgttttctttatgtctgtgtaagttttctctggattttccagtttcctcatacatcaaaaagatgtgctttttaggcaaattaatttgtttaaattttccccctctgagtgtgtgagtgggtgtgtgagtgtgcccggaaatggaatggccagcgttggttcctgcctttttcccagagcagtcatgataggctccagcaatttgccaccctaaactggaataatcatatgaaaaaaagaatagaatggacgaatacaatttatttccaaataagtatttttaaggcatacaatatgtgatggttaatatgagtgtcaacttgattggattgaaggatgcaaagtattgatcctgggtgtatcttcagggtgttgccaaaggagattaacatttgagtccgcaggctggggaaggcagatccacccttaatctgggtgggcaaaatctaatcagctgcccatgcaggcagaataaaaagaagaataaaacgaagaatgtgaaaagactagactggcttagcttcccaacctacatctttctcctgtgctggatgtttcctgccttcaaacatcagactccaagttcttcagctttgggacttggactggcttcttgcagttggcccattatgggactttgtgatcgtgtgagttaatactccttaataaacacttaataaacccatatatatatatatatatatgtatatcctattagttctgttcttctagagaaccctgactaatacacaatacttatacaaatgcataataaacaatgtggtataaaagctctccacaagcccaccatatttgtccttgttgtttttgaactgcccagtgataggaggtattccttataattttccttagcaaatatttattccttgatctaactgatagccactacaacctccatcactcacttattcaccaaaaatttggtaaataataccaactaaagaaaaaatcaaatttgtaagtaattaaaataagttttattggaagtgttactgaggactgtagactgaagtttctagcctggcaacagccctttcaagaggttcttccagactgttctgccacagtgtttcagcctcctgcatatatgcaggtggtggaagttcagtaaatgcaatataatacagaacttgctcagtaaatgcaatatgatacagaacttgctcagtaaatgcaatatgatacagaacttgctctgaagttacaatatagcagaatcacagcaaggtttgggtctgttatagattacagagacataaccactcaccaaatcagacattatgttatgtgtaggaaaaggcaaggactagggttacttatgttatatggaatatattgattaaggcaagagatgcacggaactgtgtgttgaatcctgttttgtcttcaaagcatattttcagagagctgcacattgtctcaaattcaggagatctacaaaattttgttcgcaagcagcaataagcaaatatggctttttacatttcttactttgtctcacaagtttctccttttgctcatgaattaatcccccagttatatttacaaagccaacattgattagctaggaaggatgttttctaggaaggttcatagtcttcagttgcggatgtaaggaaggaggaccaggtgcatatttgcctattcattggaaaacatgcattgaattacacatccatttttattagaatgaccttttcttccccccgatgttgtcatttctgcacccaaaatgacacctcaacaggactattgcaacgatactatagattatacatagaagtacatatttaatatcatcaaaattacatattggaaaaaatacatgataactggaacatatatttgtattttttattagttgtactgtttacccctttttatatccatacttatgagagacttccccataaaaatagatttgggctaaaacaaattgtaaatatttttagagaaaaattctaaccaaaactctggatgacaaaaccttacaatagccacagttaaaatttgatgaaagttttcaattgacaaggaaattggttatttctatcacatgcagcattttaagataaccagaatcatgactgagagcatcacattaagaccaacacatgtttatgttttataaaatttttagaatatttacattaatagcatatctatataactataattttagaaacagtttagcatagccattaaaattataattaacatttgatttttatgaatttatataattttgggacatttatatcaataacatacccataaatctaactgaaagacctagtataatttattatttgataatatttctcatacaatttacgaagttagtctaatcatttaatccaaaaagacatactttagaattttgatgctggggaaaccttcaaaagatgccaaaaggtttaaaatgtttgatccaacacaatcacatgtcacagtataaaaaaaaagtcaattatttaaacagagtccagagtggtaatcaaaatacttcaaaagcaattgagaaagttacatagatgtaaaagatgtgaaaacctcaagccctttaaagctcagttttctaattaatcaaaaacctaataaagacaacagaggaaattattttgataaaacatgaaatctttgtttttaggccagttaccaagaggaaaagaaaaacctgaagtgtaatttttctactttctcgaagcccttttagataatctacatatatctatataatctatataatatatatactatatataatctatataacatatataatatagagatagattatatattatatatcgtataatatatagatgaattagatatatataattatatagattatatagattatatatataatagcgctgctattcattgtatacaaggcaggggggcagggtaaggaatatgagtcatctccaatgagcgacagagtcacacaagtcaccgggccaccggacaggggtccttcccctttgaggtggcaaagctggagagaggcaggacagcttacgtcactatttcttctatgcagttatcagatagatcaaagactttaatactttcactaactctgctactgctatctagaaggcggagccaggtgtgcagagtggaacacgaaagtggaccaggagcgtgactgctgaagcacagcatcacagggagacgattaagcctccgatggctgcgggcaggcctgactgatggcaggcctcccacaagaggtggtggagcagagagttctctaactcccccggggaaagggagattacctttccggtctgctaagcaacgggtgccttcccaggcactggcattaccgctagaccaaggagccctctagtggtccttacccgggcgtaacagagggctcatactcttgccttctggtcacttctcactgtgtcctttcagctcctaactctgtacggcctggtttttcctaggtaataattatggaacaggtaataaatgtagaacaaagattaatataataaacaattatgctacaaactaatgattggagatattcatatataatcatatatattctatttctagtataactattctcattcttattattttctttattatactggaacagcttgtgccttcaatctcctgcctcggcacctgggtggcttacatcttataaataatgcatcttcatattcataattttctttacgtctctttctcctacttactgaattatttctgttatttaataaacaccccttaaataacctctgaattagacaaaaatattattttctcaataaagaacaaatttttatatcatgattacaattttttacactaaaaacacatcaatttgggtacacattatacatagaattacatatattaattaaaacattttaactcttagtaaccttaaattttagtgaaagcctaaaaagcaagatattgaattatttgtcatatatcaatgttttacagacgagaaccatttcataatttttaaaaacacttttccttataacataactttttctaaattgacgatgacttggacatttattatctattatttaatttatcataacttaagatttaaaattctataaaaattatatttataagcatttattccatttacacttccctactttattttaaacaatttccttacattagttatgaaaactgtgatattagacaaacctagtcatcatttcaaattttccttaacagtttttataactggtgaatatcaggtgtttacatacatgagaaaattaaagtaaaatatatgggtattttgccagtaactcagaaatacaactgttgtttttattaaatcaacaataataaattagtcatgtttatcaaaaattacactaacaaaatttattttgtttggggctgggcttatagttttaggtattttgcgccaaatcctgacacctcaaaatattttgaggtgtcagacatataaaactgtctgaccagtaaacacagtaaacacaggcaaaaatgcatgctgacaagtttgaagacacttctattttattttaccagtaattttataaccaaattacttattagtaatttacttaagtcatgagaactaggaaatatttgcgcttatttatgagtactcatttatgtaagatactcattatgtaagatacagtttggctgtgttcccacccaaatctcatcttgaattctcatatgttataggatgggttcagtgggaggtaactgaatcacggggacaggtctttcctgtgctgttctcatgatagtaaaaaagtctcataagatctgatagttttaaaaaggggagttgccccaaacaagctctcttctcttgtctgctgccatgtaagacgtgcctttaaccttccaccatcattatgaggcattcctagctctgtggaactgtaaatccattaaacctctttgttggtaaattgcccagtctcaggtatgtttttatcagcagtgtgaaaatggactaatacaatgtataagtcaatttgataccatgtaaaaacagcatgtaacacaaaatatgtacatgtatgtaaacatgtaaacacatatgccctcacactcaaagatctaatagttttcactttagagcttcagacataaaatagtaatataaattcatttgtttataaataacagttggatccaaattatgtctgataaaattgagaactgttcatgtggctaaactcttcttgctcatatggaaaatttattgaatgccatgaatcaaaattttggctaaaactgttcctacaaaaatttgatttttaaaaccccttttactttttttattcaattttaaatgagcttatgtttaaatttttaatgtttacattgtagctagaactggctgaattgtatgaaaaacaaaaaatctccaaggagccttgaattagtgatactgtaaacaatgagttttaactcaacaccattagaaacgtgaatagatcaaaggaagtgggaaaacatagctagacagagaacctggctgactctacatattagctctatagttgcaggttgatcattggagctctaagtttttcttgatgtaatttgaccatcaatttaaaatatgcataagaacagaccacaatatgtaggcttctggaagcctagccaacccagcatgttttaatgtttaagaattcaattttttgtaaatttagtattaaatctcttttagttaaacccttccatctagggaggtacttgcaagaataggctgtgtgtgagttatacatgaagcctgcaggaatgttgactagaaattagtttttcggtacccctattatttcagtttgggatgatttatttcccatggtgaaatgtcagcaaagcgagaatactagtgagaaatgtagcagatcaaatgtcctcttttgagtgttgccaatggctatcactcccattacatgtttcagctcctccacctggtcgtctaaagcaattatggggactcaaagcactgagtgactgaccctgacgtgtctgtccctggaagaaccaattcttaattacgtatgacaaggaattttctacaagaccactacacatcataaagattgtacctctgacacttccacaagacctctgatcaccagaaatgccaaatcagaatctggctgaaaggattctgagtgtctctagtctgcagagttaacacaggtcaaaccctcataaattattaataatttctgtcttcctgagccttatttacagagtcaaatcgaaagggaaagcaccaatacagcctagccaatcttacagcttctcacgtttattccttcctactatctatcaactaggagacttttccttcttgagaaagaaaaaaatctcgagaaagaccttatctcttgtcaaggagtgagagcaactagctgaataaaactcaagtttgttaactaaatgggaattctgagactcaggagagacacatccagttgtctgtaactggaggagccagaaggaattaaagggcagggaccaagtgctggtaccaagatgccaggtccctgcaatgtttccgacgaccctgaatagtcagctctgagtccctttgtggttgttatgactgttgattaaacgaaaaaaattacgcttttaaagaattaaagttagttttattctgaagtcttactcaggactatagactgaaccagcctctaaaagagcagccatttagaaaggttctattagttctagcacagtattttagccctgtttatggacaggtggtagaaattttaaaaattttattagaattggttaggaaaagtaaacagatactttgtgcaaaaccacattcaactttctcagacattccattaaagtaaataacatcaaagttttggtgtaggagtaggagtagatctggttatcgattacagaagcataatcactaacatcaacagatgttatctcctgtataggaaaaagcaaagactacatcatttactgttcaagaaatatagtgacagccgggcgcggtggctcacgcctgtaatcccagcactttgggaggccgaggcgggcggatcatgaggtcaggagatcgagaccatcctggctaacacggtgaaaccccgtctctactaaaaatacaaaaaattagccgggcgtggtagcgggcgcctgtagtcccagctactcaggaggctgaggcaggagaatggcgtgaacctgggaggcggagcttgcagtgagccgagatcgcgccactgcactccagcctgggcgacagagcgagactccgtctcaaaaaaaaaaaaaaaaaaaaaaaaagaaatatagtgactcggccgggtgcggtggctcacgcctgtaatcccagcactttgggaggtcgaggcgggcagatcacgaggtcaggagatcgagaccagcctggctaacacagtgaaaccctatctctactaaaaatacaaaaaattagccgggcgtggtggcgggcgcctgtagtcgcagctattcgggaggctgaggcaggagaatggtgagaacccgggaggcggagcttgcagtgagccgagattgcgccactgcactccagcctgggcgacagaacgagactcagtcaaaaaaaaaaaaaaaaaaaaaaggaaaagaaatatagtgactcaagtaagggatgtgggagagtatgtcttctatccagttttatcttcaaagcatctttttggaaagctgcacattgtcagaaagtgaaggattgtgaaagtatgttaacaagcacaaatcagcaaacgtggcttcttacgtttgctactctgcctcacaataattatcctgcttggtttttattaatctttcttaaatgtgtatagctcacatttattttaatatttaattttagaagtgtttggggtctttatttcaaaggttggtaattttactattttttttttttttgacaaggcatatgctgtaggaatttacctcttgtttttatcaattagcctatggtaacatttgttttctcacacgtcatttcacttaaaagtcaaagtttccaagaacctatcaaagacagtaaatgaggacttcctgtatcttgcccattttcattagattacaagttaatttcagggcacgcaaggaaaaaacactatattctatttacatatctattaattgatattctttctttcaaatatgaatcaaagtaacagaatacatgcctgaattgaaaagatttcacagatttcaaagtgtctttttacttttcctaaccaattcttataaattactaaaataaaacttttttgtggaagtagagaaatgattttaacttgactatgcctttttattctcagagtgactggttaaactacaagatatgttgtggaagtcgcctaaattctactaagcatatgacagcaatggtcataaattggtttgggattttttttatgaaagtttataaagaataccacttttattacctactataattgttaaaaactagaaattcactctgttatttgaattgcaggagacgaataaaagcaaaatgaaagtaaaacaattaactttgttaattatttatatctataatcactctaaattatatatttgataacatcatggcaacttgcatggaagaatagctaaatcttaatccttaatattggcttatttggtaaaaagtagctttttaaatatttcccataaggataataggattatatttatcaacttttaattctttataaatgacatttttgtgatgatttcagttgttttaatttactttgcaaattgataatcattaaaacattcatgcttctaagtaggaaagtgtattttgattaattaagggccagtgcctgaagaatatgtttgctgtcgatgctgagttgctctgtatgagcagttaatatcataagaaatgtaagataacataaccatcattttattgatgttcaagaactgacaaaaatatgctaataattaagagttgaagaattatgacccaaatatttctgatgctaacagcatatgctgtgatctgtaaagaaaaaaacaaacttagatgacacagttttgcgtggtgtttactttctattaaaattcttcctcggggctaatttgcaatattttattcctgactggctaaaggtataattaatgatttgctgaatcatattttacatgtataaatagcacaagcacctgaactattctacaatgagctacttggatgttttaatgtagttttctagtttcttggccatataccgctgaaattaaagtggatttcttttgtttacaagtgtacaataaaataataaagagatacatccatgactagatctcaagatgccagaaaaaagaactaaaaccttctgttaaaagacaattaattatatttatcttatagttattggccattttatttaggtaaaaagtattacacacacatagttcttttttcttgctttactcttgctttgagataaagcacaatatagagatttgatatcaaattttatcttttaatagaacagatttgtgtcactaaaatgacaattttaatgtagtatctgaaagactagtatttgtcgaaaacactgtatttagctcgatttatgaggaatgcctgatgctttcagcagctttacccagcctgagatcccagttacccaacttctcccaacctgagctccaagttagttgggacagaaacagtccttcaggcagctccagaccctttagaacattgtaaataccgtctgctcttctccctccagttcggttcaagggagagaagtgacaattgggcctacatgccaccgtcttcagaccaagactaagataacccagaaatggagagaaagtgggggaagaggaagcaaaaatgccacaaaagttgagttttcctcgtttgttcatttacttgaagctgtaaacttttgactgttttccactgcttctatatagttattttattcatttgcaagcttttaaaaaatatttctgtggggaaccaaaacttgagtttcctgttttgccatcttgctaattttacaggatgatgttactttttaaggatgtttctgtttgtgttcaggagatgtatgtagataagagagataaggtctccagtttttgatattttaagaatttttttcttttaattgtttactaaatttggataatgagataatgctgggctcatagaatgagttagaaagtacttctaatgcttctattttggggaagagaatatagagaattggtattacttctttcttaaatgcttggttgaatttattagtaagtaacttgtaattaaggatgttctttttggaaggttactaattagttattacattcctttatagaagaatactacgcagattatctatttctttttgtataagctttggtgtttttttgcctttccagcaattttaaaatttcatcagctttgtcaaactgtggacacaaagttatttttaatagtcaattgtgattatatttatggtatcaaccgtaatgacccctttttccatttctcatcttggtaatttgtgtttttgttcttgttttttttttccttttgccatgttagagtttgatcaatcttttagatgtttttaatgaacagtttttggtttagtttattttctatatcattttcgtttttaaatttgttgattgtattagtctgttattatactgctacagaaaaataactgaggctgggtaatttatgaagaaatgaggtttaattgactcacagttccacatgctgtacaggatgtatggttgctgaggcctcaggagacttacaatcgtggcagaaggtcacgtggcatatcttcacatggtggcaggagagttagagaagggggaagtgctacacacttttaaaaatcaaatctcataagaactcactcactatcatgagaacaccaggagggaaatgcacccccatgatcccatcacctcccaccaggtccgtttgccaacattggggattataatgtgacatgagatttgggtggagacatagagcaaaaccatatcattgatgtgtcttctactttttcttatttctttgtcttgacttgtttaggcttaaattgctcttctttatatgctttctatggtggtggcttggtttattgattttagtactttttttctaatattgcatttactgttctatactctaagcactgcttgtgttatatattacacattttgataattatattttcattttgagttagtttaatactttttttccctcaagactttccatctgacctatgcattacttaggtatgtgttatttaatatcttagtgctcgtatattttttgggtatgttcttcttattgactactaattcaattaaattattttcagagagcatattttaaatataatttccattattttatatttgttagggtttgctttatgaattaagatagtctgtattgatgaatatccatgcacacttgaaaatatttgttcctactgttggtaggtggaataaatgtccatcacataattttgcttctggtattcagttcttccacaatcttgctaattttttccagtgaactgacagagaggttttgaagcttcaaaacataacagtaagtttgtgtacttctttcagttcaatcagctttttcttcatgtgttttacagccattgtttggtgcatgcacatgtaatttttttataccttcttgatgagttgatatttttatttttatatgatgttcctctttgcctctggtaattttgtttgggtttttaatctacattgccagatattaaaatagccactccagatgtcttttgattagttttttatgacaatgtttttcatctttttacccttaaccaacatacataattatattttatgtgagttctggtatacataatatttctccatcttttatttaaggagtttagactatatttaatgtaataattaatttatattaacttatgctaacatagtgtatcattatcgataagtatttgttccttctgtttttgcttcctcctttttgtcttcctatggattatataaacatttttgatattctaattttgttaatctatagtttattatattgaaaatgactctgtatatttttcattgatagctccaggaaaagcaatacacttatagaatacattagaatctactattatcaacattttatctctttgagagacatacaaattcacctccaaccacaattgttagatagctgtcttaaaactgtcagaaaatactgttccattaaatttacacatttctgcaatttggctttttggccaaaataaactgagatgctaaagaaagtttctgttctttcactctgctcaggatggtgtcacctgtatcatttctacataaatctcagacttataatttcagagttcttatgtcataaaataaatcccctttgtacatgaagtgtaactctccagctctcaccacattgcccccaaggagagaataactgtgtgtgataaactgatgtgatcatttctaaaataatccttctgatcttttctctagaaatctcataattgaattcaatataatatcaaaattatcaatattaaaaatattattaaatgttaactctaacagatattggcaaccatctcaatgttaaaatttttgcttttgacagtcaaacacaatcttaaaatctaaataggagaataataatgtattatatttacccatatggttactctttctgttctccatttataatcctccaatatatattttaatatattttcctttaatatgtatattttttcttcccttaatatatattttttatttccctagaactccctttagccaagtttcagcatatgggattgtggcaaatctttttagctttcaatcacaggagactatctttaatcataattcctgaatattattctttttggatatagtatttcatgttgataacactttatttcagtactgaaaaatgttatgtcagttcattcttgcttccatggtttctaatgagaaacgtgttgtttttcaagttgtttttctcctataagtagttttctttcactaagcctgcatcaagatgattctcttgtttttagaaagaagtttgccagcaaaatatctctgcatgattttctttgtgtttatcttgtttagaattgctcaagttcttacatccatgtttgtgtctttgccaaagtggagaaatatttagcttattatcttcaaacatttttcttcagtcacccatttgttctcttctttttctagaactctaataaaacatatgtttgatgttctactaatgtctaactcataaagcttagctgcacagttttagttttgtctgttttccctctgttggttagattagatattttttattgatctatgtttgattcactgagtctttcctcttttatttccagtttgttgctgagcctctccagtaagttttacaaatttattattattatttctagttctcaaattattctttggtttctctttatatcttttttgtacctcagatacttctgctgagattttcttttttttacctgtttcaagagtgtttaaaaatgctttctagaacatggttatgccagctgcttcagaatcctttttctctgtctttctatgtctttcatctctgttcttattcaaattactattatttaatttttgtaggaaaaaaatttttttgcatatctcttggatgttttgagtattaggttttaagtctcaatttcttatttaaatcctctctttcagtattgtcaacctgttaaggaagttgttctttacatttcagttaagtttataaaaccttgtgagtcactcagatgacaaagttccaccctatagtctcttcagccctggcttgaagttggcaggagcagccaccttgttattacatggtaaggaagagcaggacagggttttcctcactgacttagtttgagtgtggtgcctttgtcattattgtaggaggtttttagtcagcgatttttgaatctgtaagatgatagaaaaaactctattatttatttcactatatatatatttttttccacacatccttttttctctccaatgcaaactccagttacatgtatagtagtgctcttgatatttccctttggtcattgaaactccgtttacttgtatctatttttatctttttttctgagattggataatttcaatgaaagcttaaataataatttcttcccaactatctaatgttcctagaatgtgctgaaatttctgtaaatagatttatgttgatatctaatatctagttgaattttaaacaattcaactcattcaaatgaattcctataaaagactttttactataggtgattaattgcattctcaaattttcttgacttttattttagcactgcagaaacagaaaagtggcatgcctgatctctgccatgcgcctaaggttaaacaatataattatactttaaaaaaattacttgaggtcttggataatgtgctattttatctaggcagaatagcaagaggagtgtgagatcttgtgtgtagtgatgctgcactgttgtaaagaatcatctgttgactatgcaagacaaatataataattttaaacttcatatatgcaacagaattaattatatataattaaaaaacaattttttaaatgttaagtagttgaatctatatgcaaacataagagaatatttaccttactctgagttataaaaatattttgaaattttgggaagcctgttgaataatcaccaatgacaaacagattgagaagtaaaaaacattaacaaagaggtgggttctgttttccaggtgaaacttttagctccatgacagaccagcctgtagttatctgtgtgcacagtttacagctacaaaaacctactttggtattcattacagaaaagtgctgagttaattgtaagtgttattccttcagcaaaatattcactgagctaaaactctttgtgacattttacaatgcatacagcctcatgcaagtttagacaagtggatttatactgtcttatgagtgcccactcctgatatattacctcattatgcaaaaataacatatctttcatgactattttgacaaaagcttaaaacacatatgaagttcaactttcaggaaccaaggactgccagaaaatattagcctctacattatgcatgcatttagaagcttacctgaaatctaccttttataaaggaatagtatgggtaagtggaactgtacattttttaaacttgattgccattaaagcagaaattttaaggctgcaacaacaacaaaaaaaaattactgcatgcttactgagtacaatatttatatttttagccacgaagaaatttttaaaacagagccagggtcaaaatcacttcatcagcttggggcagaattaagaaaagactttgactgttataattcacatttctaagtgtcccatgagttttattagtaagatttagcaggtgcgaagcagctaccttggccctgtgctctctgaaatcaccttaccatagtctgaaaccattctaccatagctgttcaagagagaagacttttagaaataggagcaatattataggtcaagttgcagaaaatattaacgtattagctgatctagtgcccagtaccattatgacagctatgcctgcataatattagctacatatcctaagtaattaaatttcacatggaatatatcaatgttgtaaaaactcaatgttgtaaagtatttaatgtgtagtagagaggtgaaatatatgacaaatatatgagataaatttaccttcaaacatctttggtaaacaaaaaaaaagtcttttaactttttcttattgttgcttctcttgtttttgctattggtgtatttttttcctccaatttctgaggtataaaagccaataaatactctgtaaagcaacaaattctgttatagttcctacagaaccgatgctcacgtgtcttcacagtgaacttctcttagtcctatgtatgtgtttgagtggtttgtgtgtatatgcatatgtgtatatacatcataaacataaatacatatatatgttttgatcttgctatttgctccactctttgtagttttcaaacattaataattatctaatctgatactcatagtgatggaggactcagtggatcttccaaaactgtgattgagcccactcaagtagaaaaattgatatacagtcataatgtccagagggatgctggcttttatagaagtccttttaaaatcactaaaagaccaggtgcagtggctcatgcctgtaatcccagtaatttgggaggtggaggaaggcagatcacctgaggtcaggagttcgagaccagcctggccaacatagtgaaaccctgtttctattaaaaatacaaaaattagcctggcgctggcgtagtggtgtgtgcctgtagttccaggctacttgggaggcagaaggtgagaagaatcgtttgaacctgagaggcagaggttgcagtgagccgagatcacaccattgcactccagcctgtgtgacagagtgagactccatctaaaaaaaataaaataaaataaaaataaaatcactaaaagagtatggtcattatttgagtgaacatgcacccaaaatgcttttccttggagacagcaaaacttcatttctagtcatgctgtccagggagacttatcttattgatgtcctttatataataccaatgacagatactttccatttgagtggatatgccctgtgctatggtttccatgtcctctccaaaacacatgttaacatttaatttcatatgtggcagtaaggagaggtgagtcctctaagaagtggttgaatcatgaaggctctgtccttatgaatggattaagctatacatggattaataaatcaatgggttttcatgagaagaaaactagtgcctttataagaagaggaaaatagacctaagctggcatattaatgtgctcacctcatcattgtgtgctaccctgtactgtctctagattctgaaaacaggccccaccagcaagaagacaccggacacaaccccttcaccttggccttctcaacctttgaaacctgtaagaaataattgtttgcctttataaattacctagtttcaggtgttctattctaagcagcagaaaatggggctaatacactcctaaaatgtatttttaatagaatgcaaatttgttttctttgtctataaaagacagttattttagcgggtttctgccaaattgcatttctaaagaggataatttcttgcaataaaaggagctgtttcttcttcatacttagaattccactgaattaataggaactttgaagatttgtgggtcttgcatttgttttctgtactaaatactcacttgtgatgcttgttgtttcagaaatcctttctccctgcggctgaagaaaaaagtgtgcagctgcctgataacctaataataaaggatatcagagtcctctctccccaatgaacaaacaaaaacatatttacacattccaaaatcaatacaaaagaagtaattttgctaaagtctaacaaaatacatttcattataactatatatacacctaaaatacacatttgacctaaactttgctactctgaggtctagccatgggtatgcaagtctagaatttagattgtttttgttcgtttgggccttatttatataaatgaatacgttcatcctggaaacaacctatttcgatagaaaacagatggatactgacattttgacaaaggttaatgtaatggcattgcagaagaggtttatgtttttgtttttaaaatataatgtctattctttttgccttttagtttttgtcctaagtggattcatgcctcagtcatagtaaaaatttaagttaaaaagtttaaaactttttttagcatgaaaaaaaacaacttaaaacaatgtttcaacaaaaattgcaagtttcagggtacaattgacaagcactcttgtaaggggactttggtggaatgggggacactcaccatgtcagtatttttcgggcttctgaagaaagtgcctcagcacagacattatcctagtagtccagttatctgggatgctggcatagaaagtggctctggcagcatcacagcagaggcaatgcctttggcaagaatcagcattttagatgttacttcagcacaaataaaaaactagaagcgacaatacaatccagagttgccatatacaggccaagaaaacttatgactctgatggcatgcatgtagagcatagaactaagctatgagcaaacaaaggtataagaatgatacaatggactttggggacttgtggggaagggcggtagggaggcgaaggataaaagactaccaatatggtgcagtgtatactccttgggtgatgggtgcaacaaaacctcacaaatcaccactaaagaaattacttgtgtaaccaaataccacctgtaccccaataacttgtggaaaaatttttaaaaagtaagaaaataaaaataaaaaaagaaattagctgggcgtggtggtgcacacctgtggtaccagctactcgggaggctgaggcaggggaattgcttgaacctgggaggcagagattgcagtaagccaatatctcaccactgcactcaagcctggtgacagagcgagactccatctcaataaataaataaagtaaacaaaaataaaaacagcttctggaatgtcttcaaattatttcaaatggttgtaattggagctgaagtgacactaaagcctatttgagtcaaaccagcagaatctgtttttgtgcctgatgttcagagctgttttagctatattatagactgatggctttcatttttcacttcaaatttccctgtatagtccactatattttctcaagagcttaataaggacaaaagctaaaatggaagcttattgctgtcaatgattacctgcctgttaatgtgtgtgtaggtatatataatgctaacagtgcgattttttcttaactactatttaaagatgtgtcaatggtaattcatttcacagagagtaacacgagcctaaaaatagaataggaagtaccaaattattcttaaaggaaaaactttcgtttgctgttttgaggtggactggacaaacaagcatttattgttaaattatttacacttaattgtaatgcattatacatttcaaaattataggcaaatcaccaagatatatttctagatatacgtgttaaatgagtttgctcgaaaggagacatcatttatagtaagttttattattattatagacaagaacaaatgcaagtggagcctatcaaaataagctacattaagcccaggtgcggtgactcatgcctgtaattccagcactttgggaggccaaggcgggtggatcacctgaggtcaggagttcgagaccagcctggccaacatggtgaaaccctctctccactaaaaatacaaaaaacttagccaggcatggtaatcccagctactcgggaggctgaggcaggagaattgcttgaactcaggaggtggaggttgcagcgagccaagatcgtgccattgcactccagcctgggtgacagaatgggactcagtatcaaaaaaaaaaaaaaagaaaagctacattaaaagtgagcagtcaataaaactctgaaaaaaaatacaagctgatgtcataaattcataaataaatatatatttttgagtttgagctaatatttgaaaagactgcagtatattactcataactgcttatactgtgtaactgtgtgaaaataatataaaggcaaggatgtttgacatgaggacatttttattcgagtgatttctctagagattgatatttcacaagtatagaactaatatatatttatttgtgatacaatttacattttatatagcagtaataataaattaaaatcttagctaataccatttcagcaaggcaagaacaatatccatgaatcttttactatttcataattaaatgccagatcaagaaaatcagtgaaaaatgagccttaaccctgatggctcatgcctgtaatcccagcactttgggaggccgaggcaggcagatcacgaggtcaagagatcgagaccatcctggtcagcatggtggtctaaaaattagctgggtgtggtggcggacgcctgtagtcccagctactcaggaggctgaggcagaagaatcgcttgaacctgggaggctgaggttgcagtgagccgagatcaagtcattgcactccagtctggcaacaaaacgagactcatctcaaaaaaaaaaaaaaaattgctcaaataagaatatttttcgtcaatctatttaatttgtctaaactcataccttatatctctatggtattcccaaacaacataagcaaatttcagtttttcattataatactttcacatgtataatgataaggtaatgtctaaatttgagaaaaaagaaaataaattacaatatcacaatactataaagaatagtgttatctatggatatgttttatatgttttcatgtatgtggagaggttagtagatatgtataggagtttacattttattgttaatataatcccctgtctctataaggctacctctacccacacccacacctctagtctccttatttcagagctagctcatgatacaggcctgaggatggttgtctgataattttgcatgtccatcttttaagtagcaggtagcctggcccttaaactctctccagttttataggcagaagcacctggatgcctcaatcctatcagtaggcatggtttttgagtctaaattatttaatattaaagatttatactaaagtgcaggtccagggaagataccagcagagatggcttcagataaaatcatttcaattacttatttggtcttcttatatttacacagaagcccggcagaacagctgcttctaaaccagtttcaattacctcttgatctctcatgctaattcacacctggttgttaagtgtagttagcctcttctattaaaatgtaaaatttcacattttgtttagcacgatttgaggattaacagttggcatttgcaactgcgaaatcacagtattgacttaatcagaagtttacatggcaagtacattttaaaaaatgtttttgtcagcattcttgattaaaacaatcaggattttcaagcactgacagcaagacggtagatactgcatagtggtgaggagttctgataagaaagaaataaactaggtgacaaatatgaaggagaatggcagagataaaaatgaaactgataaacatagattgaatagaaagaagtaaaaaataattatagcagaaattcctctcctttttaaaaaatcatggttttcagcagaaaggaaaggcagagaaattaagatcactggaaaaggtcgataacccaattaggaactgcctgtctttaaggagttgtctcatgcttggtcagaggaattggactcccacagcagaccaaaaatatgatgcttctttaaattaacttctattaaaattttggatcagttcaagcatttatttagtgaagaaaacaagaatttatgtattttttcccataaaacacagatagcattacacataacaaatgattagttacatttatataatatatatatatatttgagacagagtctcgctctcttgcccaggttggagtgcaatagcatgatctcggctcactgcaacctctgcctcctgggttcaagctattgtcctgcctcagcctcctgtgtagctgagactacaggcgcatgccactatgcccagctaattattttttttttatttttagtagagtggggttttcaccatgttggccaggctggtatcgatctcctgaccttgtgatcaacctgcctcagcctcctgaagtgctgggattacaggcgtgagccgccgtgcctggccagttaaatatgtgaaaatgtaacttgaaccaacagtcccagaaaaggcatatgaaaaactttaacaaataataacataaattacctatgtgaacaatagtggatttttgttttttacttagaaactctataatcctaaactcttgtaaaaaatggctgagttgttatacctattcgatgaggaaaaatgtctacaattttatgggttacatgttaaatagaaataaatgttagttattattaaacttaattgtcaaatttcttcaaacatgtatatgctggtgcagcctttatatcacaaaaatactcaaaaaataaataactcagatgagtttccacctggaggtcagtgccttttgcagaagtgaatctattcatttcacagtagttatttaaggagtaaatatgaaaatctaagtctgactaataattaactcagcacagtgaaaactgagtgatgtaaaggacagaagtatcagcaacattagatgaatcagaagtcagtttacccttagttttatgtgtatcactaaaaacaaatttatttaagtcagatttagttgggtttgtaatcacctgtaactgagagattctctaatatctattttcctgaaaaaggcaagaggtgctccatagaggtatgtaattgtataactatgtttcaactatcaaaagacctcatgaagcagaagaaaatagtcttacatcacgataagtgatcaaatgacttaagagacataaacaaaaataacataagacaaccttgattttaaagggctgtacctctgaactaaatggaggatatatagtgcgcctctgtattgtttcttacagctgaatgagaatgtacaattttctcaaatataaagcttagtgttaagaacacttcaagtcccttaagcatcatgtaggtatttgccaaaaataacttctacaaataactttactctaaacatacagacaccaagtataatggtgtcactctaattctgatacacaagcaagctccttgaaagtaaattacatacaatttgtttttgatctataccagacttacatttcccctttcttttggaaatcatagtgtgaaggacatactacctatcacaagagatagaagtataatctcagaatgaaagacactgactaaatgagtataatgtgatagaagtaatgtttggctgctttatacattttttaaaatctctagtccaaagttacctttttgtatggaaaaatgactggaagattgtttatataaaactttaatttagaaattaggtttctatattaatctcaaggaaaaagatagtgtgagaaaaaattataatgaggaatctaaactatcatacttcccacgtgggacagcaatgtaactatgttttattttcatatttatcaaagaaaacactctctgcgtcattctgaaaatggtgatgctaactaagtacctgctcattatcttctcagctgaaattcttgccaaatgggtgcttctttgatagaactataacaagctcaattcaatttatttttatattgaaggtttacacgaattatcataaaatatgttttacagagaattaagacaatgagaaatacctcattgtactgactgcagtatctgacatgtactaacaaaagctagagtttgcagataaattggcatgtaataaaagaatattgacatttaagatagctttttattaaaataattcttacattttctgtttgaagagggcagattttaaaaggaagtatatttttaataataatgtaaaggaaggaagaataaagtgtaaggacacaatataacaaagaacagttcagtgagaaagaacagtttgctcaaaaacctgggcatatttattttaaattgtggcatagttcacatataataatcacaatttccaattgtacactttaatgtactttgatgaataggtacagctccagagcttcttctacaaacaagattcagaatacacctattaccccatagacttcccacagagcccttttcagtcagctcaccctgaactcacctccaactctggctgttggctcctggaaaaaactgatctctgttaagttcatatagttttgtcttttcacgaatgtcctataagttgaatgatacaatgtgaagccatttatttcttcttgcatgggtcaagatatttttgagatttatgcacgtataaataatctgttatttatcttgctaagtagtatttattgtatgatgtaatattccacagtttgtccaactgcctggatgaaaaagttttggttgtttcttatttttacctatgcataagttaccattaacattcaaatataaatatcaacactaacatatgactttctgagataaataccttggagtggacgggtctatctaggtcatgtgggaagtgtgtgttaaggaaatggtccttctagttttcatagtagttgcacatttttacacttctatgagcagtaagaatttcagtttttatttttcatacaaccactaataattaataaaccagtcttcttttcatttttaaaaaaaaatttcaatagtttttttggggaacagatggttttgattacatgaataatttatttagttgtaatttctgagattttggtgcacccgtcacataaacagtgtacgctgtatccagtgtgtagtcttttatacctcaccccccttccacactttcccaagtccccaaagtccactgcatgattcttatgcctttgcgtcctcatagtttagctcccacttataaatgacaatatgtgatatttggtttttcattcctgagttatttcacgtagaacaatggtctccaactccatctaggtttctgtgaatgccattatttcattcctttttatgtatgagtactattccatgatgtatatataccacattttctttatccactcattggttgaccggcatttaggctggtttcatagtttttcaattgagaattgtgctactgttgtagtcaatatatgtccaatgtaaacttgttttaattaccatttgcctaatgacaaatgatattgaatatcatttcacaggcttatttgatatccataaccttctctggtgaagtggcattcaaatattgcatatttttaaattgcgttatttattgtctttttgctaaattttgaggtgtttgttgttttatttaaaatctgaatatatgccctgttaaattaaattaaattcggcctaaagctgcctccatatgtggcaaattgcaacctaacttagtatgtaaaacaaactgcaagctaacttaaaactatattcttctggccaggtgcggtggcttacgcctgtaatcccagcactttgggaggccgaggcgggtggatcacgaggtcaggagttccagaccagcctgaccaacatggtgaaaccccgtctccactaaaaacaaaaaatggtgaaaccctgtctctactaaaaacaaaaattagctgggcgtgatgctgtgtgcctgtaatcccagctacggaggaggctaagtcaggagaatcacttgaacccgggaggtggagtttgcagtgagcagagactgtgccactgcactccagcctgggcgacagagcaagactccatctctctctctctcagtctctctctctctatatatatatgtatggagagaatatatatatatatatatatatatatatatattcttctaacagatagctgagtctccgcaaatcttagcagctgagcttcagccaatcacaggctgccaactgatacaacatggttcatttaaggaaaaaaaacttcttcaacacatcatacccaaatatagcaaatgagcaagtttagccaatcaagattttttgtaagtgaatttctttttctctctagaaatactggctgcctgcattgctgagtggagctctctgaagctctcctgacgctgagtactgcctgatgtttgctcagataaactccgctaaatttaatttttctgcggtctttcttttatcaatccattatcaaatacatggtttgcaaggatctttcccagtttgtggcttatcttttcattggcagccaaacttgagttcatctttgactacaatttgtcactcacactctatatataatttgtgggatctaaaatatgatcatttctcaagtacttgtaaacatcttgattcaaaatgacattatcttttacctattttacattctatctgaatgcaatacttccattattgccctttatagtaaattctctacatagcaaccagagtgatccatttgaacataagtcaaattatgtcatccctttgctggaaaccatccaatgacttcctattgcaatcctagtgaaaacgaaagcttacacgctctgcataatagaaattccagttacatccctgatctgactaaccattattccctttgcttatctattccaggcatgttctctttttttgctatttcacatatgctcctgccatagggtgtttacactggctattccctctgccaaaatatctttccctcagatatgttcatagcaaactcttttctctcctttgtatctatacttaagtcatttctcagtgtggcttacctgaccgcactatttgatattgcaacctgcaatccctctgcacttgacatttccaaattcatttacttggctttattcttctacagtacatataacctcctaaccataatataatctactaatgtaacttttctgttcacagcccacatgccctgataaaatgcaggcttaaaatcagaaaacatttttcatctattccatatactcatatacctcaagaaacaattacaataccccattgaatgcatttgagtatttgttgtatattagtgagtgaataagaagattcctatacaattttatgttttttaatggttttgaacatccagctaacacaaagcctgtagtcaattaaaaatgatggttcaaaggtttctttaatgaggtatctgtagcactgaggtttaaatgcaattaattccagtagtatataaccttttattttgtttatggtggctatggggaattgttgctaaaagagatacaattattttttaatcctgtgaagaaaagtgtgacatctttattctatcctacttaatcacacaatataaaatcatttactctagtaattatctattatatctatctacgtatgcatagagagcaattcaaaatcttatagtattgtctcaaatattgacaataatatattaaatatattatttattctgaaatatttatgttttgctacaataaaattatatatcaagaaaatttatctatacatgaaatgttactgctacatatcataattattgatcagaattactaactaaaattctcctcattttgacatatataatttaaacttaaacacttgaactcattaaaataaaattgagtagatcaatagaaacctgctgttaatttaaccaatttgcagtatttagcatcctcaatatctttatagatatgtcctttaaattttaaaatcaagacaatcttccttcaattatgaaagataaacctagagtcatcgtctatgcaaacaaaatcactatgagttacatttgtatgttttctcataagatggcttatctttgaaaggggttaccaatctttctttatttcttatgcatttgattaagcatatggaggttaattgacttcattatttattaataattgtgatggctaatattgaaagtcagcttgattggattgaggaatacaaggtattaatcctcggtgtgtctgtgtgagtgttgccaaaagagattaacatttgagtcagtggggtggggaaggcagatccacccttcatctgttgggcacaatctaatcagcttccagcgaatataaagcaggcagaaaaacgtgaaaaggagatatgggcctaggctcccagcctacaactttctcatgtgctggatccttcctgccctggaatattggactccaagttcttcagttttgggactcacactggctcttcttgctcctcagcttgcagacagcctattgtgggaccttgtgatcgtgtaagttaatagttaacaagctcccctgcatgtgtgtgtgtgtgtgtgtgtgtattcacacactaataggatatatattcatgtatatactagtatatataactatatgtacttatctatatatatactataattatatatataactacatatgctagtatatatagttatatttgtatttgcagtaggatatataaataaataaataaattcatataaatatactagtaaatatagttatatataagtatatgtatcctatttttatatatatcctattacaaatacagtaatagtgtctcatattaggcacaaaaaattagcttctctttaaaatgctagtgatacagagtagttagtctaaaactgtgataaaatagtcacaatacaactgtgaaggtatatttcaaaatttttaagataagcaatagaaagttgaaataagcggtataaattcttagttgacagagtaaaaataaagaaacaagaaaacacatcacactcacacttccaattccatttaccttgctttatttttgtggcatatataaacaatacaattgtaaatgtaaaatatctcctaactccaagtttgtaatcatataactctctcaatattagctgacaggttaaagagcaattactctgaaattatgaagtatttatgataataagggataattcatctcacacagagagttgaccttctacagagctctatggaaatcagctataaacagttgctgaaggtaaccctggctgaaattccttcagctattgtggccatgaaagtggtgattcttttccagccatgaatgctgattaggtagaagtaggctggaagctaagtttctacaacatcatgttgcttccaagacttggagtacaactcttgatcactgcagcagaggccatgtgtttctccaatcacacagtttgtaaagtgcttatagtatggatgtccctgtcattgaggcatttactttatacctgtattctgtccccaaaatggcattcttaacagaaaaactgtacccctgctactacttctgtctcagtgggaaaaaaataacactaatatgagaactacataacgaaacttaagagattcataattaggaaatcatttgaatctttaaagaaacaccagaaaacaaaaaaaaaagtgagcaaaatgtataaaaaaaacaacattaaatcattttgttaaaaagcacaagagtaacttagctagagtatgtcatgggcaagagacatgaggcaaaaattcataaaagagaaaacaaaacaaataatttttcattttttcaaaaataataaagcataaaacattttgtgtaggaatagtgaaacaaagtattttaataaactaaagaggaatatcaaaaacatcattattaaataatttattaaataataaatacattcaaatatttttaaataaatgtaaattatctgaggaaattaaataaataagacaaaggaatacactatctgaaatgtaatatccactaaggaatgttatttggtaacaaaaatctttctattcaaaataaaatagtctcaatgtcatagaaagttttggcaaataatgaagaaatatatcttataaaaactttttttgataatagagagtataaaaacaggacagaataatctgctcattttatgaagatagtacagttctgtaatatagccaacaatcaatatcacagaaacacaaaactaaatactaaatatcctagtagactatgaaaataataaaacattatcaagtatgatggacggggaaacaaaatacaatgtaggttttaaagtttttttatttagaaagcaaaataaaataggctgctaacaaaatataataatacaaggctagtgaaagcagactgttctctattactataacattcagcagtaatttttttaaaagaaagacatgataagggacctcaacgtttccatctaaaatggttctttggtagatggtactataggaccatcctaaggtaggcaacctggggaaatctgagtgaacagcaaaattaaaatgaaaataagataatttttggattatgtatacatatgagaaagcaaactgcttttggggggaacttcttggaaacaatacaccaccttttacttctatgaactccaatcaaggcatattaggtcataaattatgttattttaaaaatgtgtttttagttggcattacatttcttactagggaattacttagaggtacaatctaccgattgataactccaagtaatcaccttaatgttgacttaaaactaaagcatccagacactctactgcagagatcacgctcatttcccttattaaccaacaaggagagacagccaacccaagagacatgagtaaaatagtgtcaacaaaatacgtttctttacataagataaagtacatccaaacccactaatatgattaaaggaggaaaactacatgacagttataatcaacgtatgactaattaaataacatatataatcataaaataataattttaagacataaaaactaaggtttcaataagtttcttaaattttaaaaggtatttaccaaatacactttacaaaaaccaaaataataaagcattgacattttcaaaaattagtgaatatgttctatgaagttcaacatttgattttaattggatgctctaagaaaagcagcagatagaaaacaaaacaaaactacaaataaaatgagttgagcagaagaaataaatctacagttacgtcaatttattaggtaattttaattagctagaagtccaagaaaatcaataaaatagcaaactaataaagataatagatttcagccagattcttggcaaaataccaatattaaaaaatcagcattgtttccatatatccgcaataaacaatggaacaacaaaatcactaatatcaacaaaactcataatgtgcctactatcataccaagaactgttcatgagtaatgtgaatataacttttacaattatgaatagccataagataagatctgagcaaatataaaataccatatccaaatattaagagtcaataccacagtggtaaatgttctcaaaattagctagtaactttaatacaattctaatacattttatttaagataatatctagaatttttcatgtaacccaaaaatattattctaatatttgtctgacagagtaaagaataatgagactcatataattttaaaaggtaataaaaagtagtaaatgaaagggttattatattccttgatatcaggcttgttacagagtaaccacagatagaaacagtgtacatatatagagaaagataaatagttcagtagctgaattaggaacttggcatttgatagagcttgatttaaaatctgtggggaaaataggcttgtttagtaagtaatgacccttagaactaattattattgaaaaataaagaaaattagtttttggtggggtgatgccaacaagatgattgactagaagcttcttgtgctcttccttcccataaaacaaacaaaaaacaaataaacaaacaaaaatggatatagcacattttgaccaaaataactctgggggagctccagtcgatttaaatataagattatttatgtaagtcttataactccaaaaccagacgaaaatagcagttatacaaaggacaaagaaaaattaatcaaagcttagcactacaaaaattattaaatcactatgatggacagcagaagaaaaaggaataagggagctgcaaaacagctagaaaacaaatacaaaaaggtagtagtaaacactttctatatataaaaactttggatgtaaataaaataaattctcccatcaaaggatataaagtggttaagtggattgagaaaataaattaaaaatattctagtatatgctgcctacaagagatccactaagatttaaggatacacatacaatgaaagcaacaagatagaagaagataatccacacaaatggtaaccataatagagtaagcgtggttggttatacttatatctaataaaatgtacttcaagtcaaaaattgtccaggaaacaaattgttgttgttcaatgataaagtggttaattcatcaagaggacacacgaattgtaaatatatatgcaatcaatatcggagcacctaaatatataaagcaaatactaatgaccacaaagtgattaatagataacaatacaagtaggagactcatataccctactttcaacaatgaataagcaacaaataaatcaaccagacagaaaattaacaaaatactggaattgaatttcacctttgataaaatgaatctaacatagcttctatccaacagcagcaaatatatatttttctctagcacacatggaaccttctccaggatagaacatatagtaggcccaggaaaagtcttaataagtttaataaagttgaaatcatatctagtattattttagaccataataatatgaaattagaactcagttaaaaaagaatcttagaaaattcacaaatatgtggaaattaaacatcatgcttctgaataaccaatggataaaagaggaaaacaaaaggatattttaaaaaaagagacagccaacaataaaaatacaagatgtcaaaacttatggaatgcaacaaaagcaattcaaaggggaagattacagaaaaatattcttacattaaaaaaaaagaacgatctctaagaaatagcttaatgttttgcctcaacaaactaggaaaaaaaaccaaagtacttaagcccagtgcagtggttcacgcctgtaatcccagtactttaggaggctgaggcatgtggatcacttgaggtcaggagtttgagagcagtctggccaacatagagaaaccctgtctctactaaaaataccaaaaattagcccggcatggtgggtcatgcctgtaatcccagctactcaggaggctgaggcacaagaatctcatgaactcgagaagcagaggttgcagtgagccgagattatgccactgcattccagcatgagtgacagagcgagactccatctcaagggaaaaaaaaaaaaatccataaaactagctgacccttaaacaacatggaggtttgaagtgctgacaccctgcacaggcaaaaatccacataaaccttttgactcccccaaaacttaccttctactagtctactgttgaccagaagccttactgataatataaacagtcaattagaatatatttcacactttatgtaattatattctgtattcatacaatacactaacctagagaatgaaaatagtattaagagaatcagagggagaaaatacagttactatgtattatgtggtagtaaatcatcttaacaaactgcatctgcaccatcttcaggttgagaaggcttaggaggaggggtggtatttgattttataagccttatctcctttttttagactagctaagagtttgccaattttgtttattgtatcaaaaaaatcttaattttatttatttttaataaaagaataagaatctgttattttcattattttcttactcttgctaattttacatttacagttgacccttgaacaacacagatttgagctatgtgggttcacttatatgtaaattatctttcagctctgccactccagcattcagacaagaaaaaaaaaagcatccacattggaaggaaaaaaatgaaattatctttatttacagatgacataatcccatattaaaccccccccaaggattccacaaaaaactatgagagctaataaatgaattcagtaataccgaaggtcaaaaaaatcaacatatgaaatttagtagcatttcaatgcaaatattttgacctaattaaaaaaattaaaaataccatcccatttacaacggcattaaaaaacaaataaaatgatattaagtaataactttaaccaaggttgttgaacttgaatatatatacactaaaagctacaaaactttgataaaggaaattgaagaggacacaaataaatggaatggcatctcatgctcatgaattggaataattaatattgttgaaatgtccatactactcaaagcaacaaacaaattcgatgaaatctctaccaagaccccaatggtattattcacagaaatagaaaaaaaaacaaaaaaaagtactaaaatttggatggaaccatgaaagattctaaatagtaaaaaacattctgcaaaagaaaaacaaagttggaggaagcgcacttttaaatttaaaattatattataaatctatagtaatctaaacagtatactactgacataaagcaggcacatacacccagggaacagaacagagagcccagaaataaatccaaactcatatggtcaactaatttttgacaaggttacaaacaaaacacattggggaaaggatagtctcttcaataaatggcgctggaaaaactgaatttgcacatgaaaaaaacaaaattggacctttatatcatgcacaaaaatcaactaaaaatgaataaaagaccaaactttaaggccagaaactctaaaattcctagatatgaatattagagaaagttcttggccattggccttggcaataattttttagtatggtatcaaaacctctagctacaaaacaaaaataaataaatagtgccacagaaaactacaaagcttctgcacagcacaggaaaaaatcatcccaatgaaactgtgacctatcaagtaggaaacaatatttgcaaaccatatatctaataatgagttaatatccaagatttataagaactcatacaacacaatagcagaaaaataaataacccaattaaaaatgtgcaaaagacctgaatagatatctgcccaaacagtatataaaaacgatcaacaagtacatgaaatggtcaacttcagtcaacaaacgtaagatcattgaacgtggatttcagacgagacatgcgtaatagactctcagtatccttcaggggcaaggtccagcatatccactcattaatatggacataaataaaatatttataaaatatatacctaattaaaatattgatttagatctattgtataaatatatttatattattaaatcataatattaaatataaaaacaaattgcaaaactatatgcatgttctgaggtgatttattaaaacatcaaaaatgcaaaaatattttatagtgctcatgtgtagtataagtgtttatgaaaagatacaaagtgctttgtacaaaaccacatgtaccaacttcatgacagttgttgatttgagagactcatcaagataaatggcaatttgatttgatttcaaaggggatttaactctatatataatgctataaatattttatttcagaaaaagccacatgtaaatatgacagagtaacaataacttgttgcagattacagctaattaagtaattgctttttggtttatttgcactatttatttgttatattcctcaggaaataaatgacccatataattgtaaactttagtagatttctgaaaatactttatgaatagattgtaataagattcaaatattaattttgttcagttttccacaaatctcatgattattaggaaaaactttgcgtgtcttgttaaattatattaaataataagacaaatattcaatttattgagtttccacgttgaatgtggaattgataaccttttttagtaaaagtggaaggaattaccggtactttgttattgagatggatcacttcagaaaataatggattgaggtgttgcaaaataacttacaccttttgatttaaagatgttatggaggaatttgttctctcaagaactgtgaaaggggcccaatctgatttaaaaatagtatgtaactttctcatgcttacaatacaggcaagaattaaaagaaaatagctacttttaaaaatcatcaattactttgtcatactaatatgaaattattctgatacctaattaaatgctctatgccatatcagtttatctgacaagataaatataaatataaatgcatctttgattgacgtgggtgaggaacctgagtaccacagctggtttcaagacagcagattgaagaaattatagtgatagacaggagcaagaaacacagaagtgggggcttttctgtaagacctggagcaaaaaagatgtcatcagtgtctcacaacacctgaaacagtgacaagaaggtgaatatacttgcttatttcttatctcaccctttctatttgacctcccagtaggacctccctagggccaaatctaatcagatgtctcctggatagaggaaaaagacacaaagcagcataggagagaaaatggaaaatattagaaagcaaaacaaaacaaaacaaaacaaaacaaaaaaaacaaaaaaaaaccaaaacacaaaaacagaaacacacacaaatgattattataatagaagtaataatacaaagaattaaaacctaacatttaggaataatgttagaacattgaaaataataatttaaaaattatgaaatacaatatttaaaataaaaaatatttacaaagaaaattcgggatgtcatcaataacactggatacaagcagacaagtaaacagtaatgttaaaatgcttaaagggaattaccttgaagacagaaattcttttccattaaaaccatatttagggcttctgcttttgtgtatgaccgacaaacatgctgtagttgtccttacaccttacacaagaaatctgaaaaacctatgaatcaactattttcagatagttttggagagtgctctctaagaagactgaaacaaatgagttgagtcctaagattatcctggctttcaacctaaaaggactttccaggatgaagaacagtaaggagaaacctaaaaagtctaatacacagtctcactgaggagaaagagatgggaatgaggctgagatggctagaacttgtgggacatagttccaaagagaagagaaatatgcagataaggagatacaagactgtataggacattgaagtttttgcagaatgctaagctgcacaagcacgtgagaactccatgaggctaggcgataaccacttcttgggtgctgtagtgtatctttccccagcaatcatgtatggtagaggaatatatttgagttccagtaggagtgaacagagaggacttggtaaacacctaagacattcagcagatactccacaagtatcctgctttaacagtaaaggataaagtagtcctagagtaaaagctgttctagacctgcaaagtaaagctttgaaaagaggtccggaaaggtcaatctgatcttcaaacaactcaagcacatgtcagaaacaaaacaaaataaaataaaacaaaacataaacctttcaaaaaaagataaaatctagtagacattcaaaaatacagcaagcaaactaactgacatcaaataacaattattgtaaatgaaaagaataagaaaaatggtatccttaataaacaggaaaatcattccttagaaacaaaaccagaaatgatagaaatgttgtagttagaacataagaactttaaaatagccattatatacatgataagggatttaaataaaaatattaatgtagtaggagagacaaggtagctatgaaaaggaagcaggtgaaacttcttgaattgaaaacaatcctcaagtaaaaataacattggattttttaatgttttttaaattttttaatttataatttttgtggatggataagacatactatctgatagcactacagggtgactatagtcaataataacttaattgcacatttaaaaataactaaaaaagtgtaattggattgtttgtaacataaaggataaatgcttgaggggaatgaaaaccccattctccatgatgtgattataacacattgcatgtctgtatcaaaacatctcatgtactccataaatatatacagttaacattggatattcttaacagcagattacacaaagcagaagaaaaatcaatgaacttattatagaaacatatcagactctaaactacaaagaaaaactcacgctgaacaatggtgactgagagactcttctcctgttcataaatgttaaaatgtagaaaacaagtgtgtcttacagtttatgaaagaaggttaaatagggcctgactgtgaaagatttgaaagcctggctaacaagttaagtttgatttgtggatggttgcaattctctatttctgagcaggggagcaatgtgatcagagatgagctttatgtattgcaacatccaccttctcccaggaatggaagagtacaaaagcctgcctggctgggtttggggagcatattgctaagggaaacataaacatgtcaatttaagtaatctacattagtgtacccaattactattcaggtatttacttatccaagaaatattaccggcagccacaaacccatgctaatagttccccactgtaatatacacatcagtacaaagtggaggtagtttcagaaaacaaatattaaggagatcttgaaaccatgattttcaaagctggagattcattatttcatcgcatagtgtgctgttccaggagtttgcttgtattctcatcccagagattgaataatgaatacaattatagcagtagggaatctgacaagacaatcagaaacaagctgacaattatggatattagttgaatacagtgacggttatttacctacatgaaatgaaaggtgtatttctaaaattgagcttatgcttcagaaaaacctggatgaatcatttcatttagaattttcagtttgttgaaagaaaataagacaattctactgaatatattgaggactttaaggtgatgaaaagtcctggtttcctgggagataattcagttttacacctattgtcttggtttatgtattaataacagactctcaccatatctgcccctgatggatttagaaacctttgtttaattaattcacactgccatgaaaagacagctgagtgtttgtattgcattaatgcccttcaaaatagaatgggaaagatgtttaaaatgtagttttcatttgatgacttcaaatttctcttcatatttcctcaagacgtatgtatgacataagttccttttaattgctttaggttcactgaggaagtataggactctggggaattctctgcaatatcttttgaagaattatagaacccctgctatatataatgcagatataatgcagttaaatgtgctgaagagtgtggacttgggagcaaagtcacctgggtttgaactctggtcctgccaagtgctacccaaatgaccttaggcaggtcacttaagttctgtgccgctgcagtcatacagttaatataaggattcaatgagtagttataaagttattagacagtatatggcacattcttgttagaattatgtaaccgtctactgttgtagtattttctatagcaaattaagaaaaggtttttttaaaaagacaatttatagttatttccaactccaagtataaattttgctgggagaaaaatgtggatggtggtggtttgcatacactctggaaaaaatgcatattaagtataaaaatattccttgtctgggcatagcggctcatgcctttaatctcagcactttaggacgctcaggtgggaggattgtttgaccccagaagttagaggccagcctgggcaccacagggagagccagtctttacaaaaacttaaaaaaaaatgttagccaggcatgatggctcatacctctagtcccagctactcgggaggctgagatggaaggtttgcttgagcccctgaggttcaggctgcagtgagcctaggtcgtgtcactgcactccagcctgagtgacagagtaccaccttgtctccaaaaaaagaacaaaaagttccttacccagtgactgttaattgatctttaaccatttccagaactaaagacacagtgaaaggattaagataatttgtagaaatgtgacacccagcactgccacacagaggaaatgctacttaaaaaagttgaccacaggaaaaaatcaagtgttattatatgaattgtcataaggctttaagctaatagcatagtttggctgatcctataccaattccaaaatccttccttaatgggccacacaatggaatctgaaaaagctaaaatacatctccttctctttttttgccctttaggtttcgtgcaacggatacaagcaatgaaatttcaacagaaatttcctggggtaggatgcagagttcttaggaaatcttctgttttcttataaaagtaagagcctgaagtaggtgatgattcttatcacattttactgctttgaaatagaaaataaagcctgaagattcagtgggaaatttttcaaccatgaaatgatagacaatctgctaagtaaaatgatcacaaaagaaaggaggagaccgtattgttaaaccattgaagtcctgggctgctatctcttgatttcttggtgtttgaggaaataaatacctctgttaaattcagtttatgtttactttttgtgtatgtttttgccttcaaacacatttttaaagtattcaagagtgtatgagggctaaagctctatgaatcatcctgaaatcttaaggtttgcattcatgaatattatctgaggatgtgtggtatggtttggatttgtgttcccgctcaaatctcatgttaaattgtaatccccattggaggagggacctggtgggaggtgattggatcatgggggccaacttccccttgctaatctcatgatagtgagtgagttctcatgagatctggttgtttaaaagtgtgtagcatcatcccagcactttgggaagctgaggcgggcagatcacgaggtcaggagatcgagacatcctggctaacacggtgaaaacctgtctctactaaaactacaaaaaaattagccgggcttggtggcaggcgcctgtagtcccagctactctggaggctgaggacggagaatggcatgaacccgggaggcggagcttgcagtgagctgagaatccgccactgcactccagcctgggagacagggcgagattgcgtctcaaaaaaaaaaaaaaaaaaaaaaaattatttagcacgtctcccttcattctctccttccttctccctccatgtaagatgtgcctgcttcccttcaccttccaccatgattgtaggttacctggggcctcccaggtgtgcttcctgtatagcctttggaaatgtgagtcagttaaacctcttctctttataaattacccagtctcaggtagttctttatagcaatgcaagaatgaactaatacaatgtgtaatacaccaaggactttgtagaaactttggggaggagtttgctactgctccaagcactgtataaaaaattacaagaaatgcaaagaaaggaacaaagcacaactctttgaagcagacagtacaagatattgtaagtagacttaaaaaagcttcaagaaatcattggtaagagttgctacactcccaaacaacagaccgtgtcagaataaatatattttaattcttagatatgtcttctgttatttgtcattgcaaatgtgagaaactcataacagatgtggacatcataccatattgtctatataaaatcagaagcaaaatgtgagtagacatgtagatatgcttgattttcactaaaatatcatgaacaaacaattttatttcagtgaaactttcactacctataggtgccagaatcttgagtgggactcaagttaattgtgctgactttaacattttattcaaataaattattgatacatttaacaaaataaaagcagtttcaaataaaatacaaaaaaaaatcaagagaaattacacagacatagatctctggagagacattctaattttagattagaagacttaataaaataaaaattctatttctctccaaatatatatacagattcaatgccattctctccttgaaaccccggaaattttttgtttggaagtaggggtatgcatgagctcagtgatagccaaaaagcattaaagaataagaacacggtaagagggcatattctactaagtattctgacttaatatagagataaatcaattaagaaagtgtaaaatttgtggaaagacaaacagataatggaatagaagaaatagtccagaaacaccaataaactcactagtacaataggaggtttcccatctctttcatgcctaagatttcagaaaaaagatcctgttccacagactcgaatatgtcgaacattctgggttccattttgttctgctgtgccttgtagtcattgtgtctaacttgtctcttgcggttcactggcctctgtaactccagggtcctatcatatacagtaatgcctgggagctcgacagcatcctccaccattacgacagccaccaaaactctctgttattatagcgtaggtatcagtggttttgcaaggacctacccttcggactctcatgtggggagggaacaagtcctctcctgattaatccactgtcatatttctatatttttggataccttcccttatatgctaccaagagagtgatggcatctcatcctccttgaatgtgggcctagttgagcttgagcttaatttttgtcagtcaaccaagcaaaccactagagccaatcctgtttaaagcatgctcataatgaattgttataatggccaggtcttcgctttaaactgatttccagtatcaagtctgttttcgttttgtaatccatggtgctagaacataatagcagaaatgaaaaaaaaaaaaggataaaaatgctaatattatcatgacatttaatatattcgaacagttcttcataagctaattatcatacaaacaatatgaagatgttctgtgtatcttcatcaatacttcactactaaaatgctttgttaactgctaatgaaaaaacaagtagttcattataaagtggcagccattgaacggcaaattttagtgcttttattttagcaggtgactgtcaccatcgcagaatctgccatggcactgcataatctcagtctgaaaagcaagtatgaaacatgtcttcaggattttgattgagttaaaaatggttctctgttaaaataagaaatcatattcttttttttttttttgagacggagtctcgccctgtcccccaggctggagtgcagtggcgcaatctcagctgtctgcaagctccgcctcccgggttcacgccattctcctgcctcagcctcccgagtagctgggactacaggcgcccgccaccacgcccggctaattttttttattttttagtagagatggggtttcatcgtgttagccaggatggtctagatctcctcaccttgtgatccgcccaccttggcctcccaaagtgctgggattacaggggtgagccactgtgcctggcccaataaatcatattctttatgttcagttcattttgtttaatctaccaatcctacttacgcaagaatctttttgtttgctaagtatctacttatgaggagaaggaatatatgtatatattttttccatataccttggaatatttaagtatatattaagtacttatatatatttaatatatgcttatatattccaaggtatatggatgtatgtatgtgtgtatatatgagtgtgtgtgtgtgtatatatcatatatatatagagagagatagatagatacagatttgtcttgtcttgcccaaaaatgacagttctttttccagggactttcaacaaagaatgccagcaatctctaaagctgaatttttttccttctggaaaattctttcttcaagaacacttagttaattcccttcttttatatgctaaataaaaaaactgcataaatttatttttacctatttttaatacactgatgtgtttcttaagatgtttactagtttcagtgttctgtataatttctctttataaaataacttgctgtttgtgactaatagcagatctatgagggtgaattgctatgaaaaacagaacttataggagaactctcacctctctagtgacaacatcttacattatatactttgatactgaattttatgcatttgcatgagataaaaatgcatttataataacacataaattgtaagaactgttttggaacgatcacttgtatttgtgagatttagaggatttatgactattgcgtctttctcttagaagaggtccacacaaatgtgacattctctcaggtcagaatgtaaaaaaaaaacaatgcaatctaaattcgactacttcattcatcttttagaaccatttttaaagtgttcgttaattctaactttcttcatttctgaaatgaagttcaataaacggaacaagcactttatcttccaaaagtgattcgtttgaaaattcctctgttggatttaattaggtgagatgtctgcaagtgggtaattagttcactcagcagatgaatacagaaatgtttctcagaaggcagctttattatattttcaccttcatgtaccaagaggaaacattttcaaaaataaacacttctaatgaaactgttctccttccactggtgtaattccaaataaacagcaacccagataaaatatatataatcttttatcagtaattcatgcttcaaaaaagtgtgcaatacattattaaaaattttatgaagacagatattgttatatggaagataccaaatttaaatagatattacttggaaatagcatacatattttaccataaaagaaaacaactgaacaaaggatattagacacacttggcaagactgaattttatcttagtaacataatagagctaaagctttttactacaaaatactttaaataattgcctccactagggaatttgactttcagcatttattattcaaattactgaactagatctatggattcctattaccacatatatattgcattactgggagattaacttgacctctctcaaattaaccagtgccaataaggcaaacccaatcacattataactacgtgaaccatctatacaatagagctatatctgatgtctttgtaaaattataaaattttaatgctagttttaaaatatttatgccagagagaaaaaattaatagattttgttcctgggttccagattagagaattgctcagagaaagaatttgtatgatgtttattcccgcaattgcatttgagccttaagcttttgctttctttaagattttattaatgccccaaatcctgcagcttttgctacaacagaggatagccctttgtatttatatgtttaatacaggcaatgtatatctgcaaatattattttgtacactaaattgtatctacactttcatgtgatatatatcccatattaaatatttattatacttttatgaagcacaattatatgtatttaattttcattaaattgtaagcagaatctacacaagaatagaaatatatttttaaacaagaagagaatagatttttcaatctggaagaaaaagtttcataatgaaatagttgtgcttgttttgtttaaataattgcgtaactgattacttgacacacacacaagcacacagttttaaaggataaaaatcattccttagaattccacacagtattgttttaccaaaaaacaatccaactgaatattcacatttaccattcacaacatccaggtcttgcttttcttagtcaaaggaggtgaagattccctgttctgcattcacagtgttgttgcctaaccaagtttgagtgtaacttaattttgttttgcatttttcatgccttttcatttagttaccctgtggaaaagggtctattatcagtattaaagcaactagaatatacagtgtcgaacagttacactctcaaggggatacttaggttagttagaggaaaattattctcttctacatgtctcttcatttcacagatacaaagagaatagggaatacttctttgaatacagtgtaagcacttgttacaatcagaaattactttggaaatatgcaccaaagtaagaagcagtttcctttgggcagtgattatgaatataatcacatcatctatcaacatatgtcaccttttgttttgaattttaattattttatttactggtatcgtatgttacattgttgtactaagtcctctagtttgttttatgtaagtgataatagtaggcaaacttggtccctagtcttaaacaggaatgggaaagttttaccattaaatacagtatttgctacagttttcgtatggattatttttgactagctgtggagttcattgctattccttgtttgctagaagttgttatcatgaatgaacagttcaattctattactttttcctgtatctagcttgataattattttattttttattacttaatcattttcttgtaatctcaaggaggctcacagataatgccaaagtccacagatgatagtttgagagccactgcttagacatcagttaagatttttaatgaagatttacttcagttaagatgttttccgagtggtgaactttcttgcccctggtttatgtgaaaatatctctgcttgctttcatcctttaatgatgctttcactgtattattcccaattctagatttagacatgttttttggacctttgtacattttattccacatacttttgaactctattgatgttttttcagaagtaaaatgtcagttgactcatttttttcttgtagaaagctgtctttttttctctgaatgtttcaagaattatttctgtatctgtacttattttctcttgctgccgtacaaactactgcaaacttagtggcttaaaacaacacaaatgtattaacttccagttgtacataaatccccaaagcctgtcgttgggccaaaatcaaggtcaacaggatgactttttctattaaaccaaatgaagtttacttgttaattacagtcttagaaatgagtgttttcatttatctatttgcattttaaaaatatataagaatatatttatatgtaacaatttcatacaaacataataatgatctatcattttctgtttcgtttaactccttaggaagtggcatcagggttatattagtttcattctctgctttaaacagcttttgtggttttgtagttacttatttttgaaagatgaaacaaacctagctttaaaattgagagttctaaaatctttgccactagagacttcaaatctcttcaggcttaagttggaaataaaattcaaatagcaatcaaacaaaaacaaattactattttcaaataaaataaatgatatttagtaaaagcaattcaaatataacaaataaattttatcacagctttttttttttcaattttagcctgtaaatcaaggcttttgactaattggttgatatagagactagagctagggactacaagtcaccgtttgtaagtctctgaggttgacataatagaatatgtttagcagggaattatcttaacagtaaaagcagtgaatttattcagttacatttctttccagattagataacaaaatctgaaaactagggtataactacttgacctaattcaaataatgagttggtacccaagtatagattggggtgttcattaatatttcatattgtctttctagcaattcttcagataagcttaatatctcacagctattttaagtaaaaataaataattatgctttatttattaaataaatgtgaggtattaatgcttaggtgatttaatagtgacttttagaaattttgttcttttaatatatgctgaagttatttaaaattcactttttgagttattaactcataagactgatttgacttaaaactataagctaatttgacttattttatcagatatgacttattacatgtcttaaaatatatcttgatttcattatataatatttttaatatgtgtgtatgtgtgaaagcagtggcattttgtgagggttgaagatagtcttttcttggatcaagctgaaacaattttaatttctgcatttcttacttgttaaattgatttgtcttcgggcaggttagttaatctatacatgcttcacatttttttttttctgtaagactaaaaaagtgtttgatcctttatgctgacacaaacattctactatataaaaaaagaacacttcttctgataagtttcaaggctctgtagatataataattatattgaattatgctcaatatttccattttgcccttaatttggtgtgttattctgttttcatgatgctgataaaaacatacccgagactgggaagaaaaagaggtttaattaacttgcagttctacatgcatggggaggcctcaaaatcatggaggaaggcaaagaggagcaagtcacgccttacacggatggaagcaagcaaagagagagcttgtgcagggtaactactatttttaaaaccatcagatcctttaagactcattcactatcatgagaacagttcagaaaagacctgccaccgtaattcaatcacctcccactgagttcctcccacaacatatgggaattgtgggagtttcaattcaagatgagatttgggtgcggacacagccaatcatatcagtccactcctggcccctcccaaatctcacgtcctcacatttcaaaaccaatcataccttcctgacagtcccccaaagtcttaattaatttcagcattaactcaaaagtccacagtccaatatctcatctgagacaaggcaagtttcttttgcctatgagcatgtaaaatcaaaagttacttcctagatacaatggagatgcaagcattgggtaaatacagccattccaaatgggagaaattgcccaaaacaaaggggctacaggccccatgcaagtttgaaatccagcagggcaatcaaatcttaaagctccaaaatgatctcctttgactccatgtctcacatccaagtcatgctgaggcaagaggtgggtttccatggtcctgggcagctctgcccttgtggctttgcagggtaaagtcttcctcctggctgctctcatggatggcattgactgtctgccgctattccaggtgcatgttgcaagctgccagtggatctacaattctggggtctggaataccgtggccctcctctcacagctccactaggtggtgccccagtaggctgtctttgtgggggcttcgactccccatttcccttctacactgcctagcagaggttctccatgagagccctgtccctgcagcaaaaatctaccttgatatctaggggtttccatacatcctccaaaatctaggtgggggttcacaaacctcaattcttgacctctgtgcactcgcagtctcaacatcacatggaatctgccaagggttgaagcttacaccctctaaagccacagcccaaactctacattggctaccttctgccatggctggagtggctgggatgaagggcaccaagtccctaggctgcacaaagcacagtgaccttgggtcaagcccatgaaaccactttttcctcctagacctgtgggcctgtgatgagaggggatgccatgaagatgtctgacatgccctagagactttttcgccattgtcttggggattaacatttggctccttgttactcatccaaatttctgcagccggcttgaatttctcctcagaaaatgggattttcttttctattgcattgtcaggctgtaaattttctgaacttttatgctctgcttcccttataaaactgaatacctttaacagcacccaagtcacatcctgaatgctttgctgcttagaaatttcttataccatagaccctaaatcatctctctcaagttcaaagttccacaaatctctagggcaggggcaaaatgctgtcagtctctcagctaaaatataacaagagccacctttgctccagttgcaaacaagttcctcatttccatctgagaccacctcagcctggactttattgtccatattgccattagcattttgggcaaagccattcaacaagtctctagaaagtcccaaactttcccacattttcctgtcttattctgagccctcttattcaacccttgcctgttacccagttccaaagtcgcttccacattttcatgtatctatagcagcaccacactctatatgtactactttattgtattagtcctttttcatgctgctaataaagacatacctgagactggaaaggaaaaagaggtttaatggacttacagttccacatggctggggaggccccacaatcatggtggaaggcaacaaggagcaagtcacatcttatatgtatggcggcagccaaagagaaagcttgtgcagagaaactcccattttcaaaaccatgagatctcaggagactcatttactatcacaagaacagtgcaggaaagacctgcccccataattcaatcatctcccaccgggttcctcccatggcacatggaaattgtgggagttacaattcaagataagatttgggtggggacacagccaaactatatcatttggataaatttaagtgaagatctttctctttcctattttatgcctgaactttttatacttagagattttgccatatggagacagcaatgaataaaacaaaaactgggcttcaacttaatatttgggctattggtataatgatactatatctccagttcattccattctggtttgaatgaagaaattgatttaaaaaggcagacactttgtttcagtatgccttgattgttgaaatattatcaacatgaaggcaaacaggaataggatttgaaatggtttggatttgtatcctcgcccaaatgtcatgtcaaattgtaattccaaatattggtggtggggcctgttgggaggtgattggattatggaagcatatttccccttttggtgctgttctcatgatagagttctcaaaagatctggttgaaagtgtgtggtacctcccccagacctctcttcctcctgctctggtcatgtgaagatgtgccttcttccctttcacttttcactgtgattgtaagtttcttgagacctctacagccatccttcctgtgcagcctgtggaactgtgagccaattaaacctattttctttataaattacccagtctcaggtatttctttatagcaatgtaagaatgaactaatacagaaaattgatacataagagttcggcattgttatgaagacacctgaaaatgtggaagtgacttaggaactaggtaacaggcagaggttggaagagtgtagaggggtcagaaaaagacagaaagatgggggaaagtttggaacttcctagagacttgttaaattgttgtgaccaaaatgctggtagtgatatgggcaatgaagtccaggctgaggactaaaaaataaaaaaaaaattagccgggcgtggtggcgggtgcctctagtcccagctactcaggaggctgaggcaggagaatggcatgaacccgggagatggagcttgcagtgagcggagattgcactactgcgctactgccctccagcctgggtgacagagcgagactccatctcaaaaataaataaataaataaataatgcccacatttctctgaggctctgttgttttttttttttttttcattgttttttcactgtttttcagagtgtataacctcaattaatccataaatctactgattctttggccagctcaaatcttctgctgagcccttctggtaaatttttcagttggttcttaggattttcaactccagagttttcacttggttcttcttaataatttctttatttccattgctattttctatttttttttttggtcttttttatttccttaattattttcttttaaatcattaaatatagtttttttaaaaagtcaaatagttaatgttgtatttagtattatttccttgatattcataagcaaaactgttctgtgtttttaaaagttttttatttccataggtttttgaaggatagttggtgtttggttacatgagtaagttccttagtgatgactcgtgagattttggtgaacctatcacctgagcagtatacactgaacccaatttgtattctttaatttttcatgccctcccatcatttaccctgggtcccaaagctccattgtatcattcttgtgcctttgaatcctcataacttatgagtgagaacataccatatttgctttttcattcctgagttacttcacttagaataatagtctcaaattccatccaggttgctgtgaatgccattatttcattcctttttatggctgagtagtattccattatatttatatgtgtggtgtgtgtgtatatatatgtgtgtgtgtgtgtgtgtgtgtgtgtatatatatacgtattacattttctttatctgctcattgattgattggtatttgggctggttacacagttttggatttgtaaattgtgctgctataaacatgtatgtgtaagtatccttttcatataatgacctcttctgtgggtagatacttagtagtgggactgctggatcatatagtagttctacttttcgttctttaaggaatctccatactgttttccatagtggttctacttgtttacattcccaccagcagtatagagtgttcccttttcactgcatccacaccaacatctatttttttttaaattttttgattatggccattcttgcagtagtaaggtggtttcatattgtggtttcgatttgcatttccctgatcatgagtgatgttgaacatttttccttatgttggttggccatttgtatatcttcttttgagaattgtatattcatgcccttagcccactttttgatgagattgtttgtttttttcttgttaatttgtttgagctccttgtagattctgaatattagtcctttgttggatgtatagagtgtgattttctccatctgtgagttgtctgtttactttgctgacttctttttgctgtgcagaaactctttagtttaattaagtcccacttatttatctttgtttttcttacattgcttttgggttcttagtcatgaattctttgcctgattcaatgtctagaaagttttcgctgatgttatcttctaaatttttatagtttcagatcttaggttttagttcttgattcgtatttgtcatagctatattagtagctataatagctacttttcctatacttctcctattaattccaacatttcaacccatatagatattttctcttgctgttttttttttccttgtgtatgggtcactgtttactgtttctttttatgtcttatgtatttttgttgtcaactggatgttttaaatagtatagtgtaacagttgtgaatcctaagcactccccttcttaatattcaagggcttatgattagcattgtttgctcgggtgcttgtttaattgtcaatcttcacacagttttcagccccagatttctgctccttagagggacacagcctttctaaccaccaggacaaccatattttagctgtgttctttcgaattgtcttcttatgtctccttactatatttgcttaggcaggctttctattatatcagctgttaattttcacttattattatctggttggcctattgcttttcagtagcaccctggtgtataaattgtgctaaagtcttattcaatgaggtaagtttattggcggaagccagaagttcaccagtatttgtggtttgctgggcctttcacttgacaaaaaacctgaaccatgaagcaggagctaggggaagaagaggagctagtttttcatcagcagccctaacaatttcttttctatggttatatctgtgtgtgttctgagagaatggagtgggaacaggttttgagttatggctgctgccactgtcctatataaatattgtgtagcccagagccaaggatgacaaaatcatgtggcaatgtacactgcctggccaatttacctggaataaatcttagtctctaggagcctgaggttgatctgagttgctatttatctgccaaaccctccagggcagctcttcttcaaaatagacctatatgggaaagggggacagtctcttcaccaattggttcttcactgtgtagtgggagttgggagcaggtgggagacaggtgtcacatgattaacacaagccactcaataaaaacctttcacaaattagatctgtaaaaagcattcttgttaatgttcacaagctgctaaaaacacacagaatagcttttccaccccgagatctgcgggaaattcaaacttctacttggctgctgagtccaactggggaagtaagccctgttgctgggtttatcagtgaatctggaggggaaaggaaaatggcagcaatgggatggacaaatggttgttatcttgaattcatgaaatcatgaggatgatgatgataatgatgatgatgacacttagttttaatatatagctgagtgaaaatgaacctgaaaataaaaacacagacaaagcactaagttaaaaagaatagatcctcaccttttgcaaatgtaaattctcagtttcatttacaaatagcacattgtacaagttaatttgtaattttacctttaataataaaatctattttattctgagaaaagtgaccatcaagggacaggcagtgaacatttttaaatgattgtagtttaaggcaatgcctctcaacctaaatcaactgcatcacctgggaattttttgttatgaaagatttttcatatatacaaaatgttcaacaaattatggaagaaacacttatataacaaatcaccaagtttctacttattgacccattgccagttttgtttcatgtgttttcttcaaaccacattaatgggccatttaaaaataattcccagacatgcatcatgtcaaataacatttcaaaaaactgagagcacttacaaagtacaatttgcacaattgaaacaattttatggtgccttataagaagggttggccaatgaatagaattcactctgtaaacatgctgcatttctctccatgaatggaaggtacagtcatggtccatttcattcatagctccatcttgatcagagaagttccctcacaatctgctttagacattcagcccctggggaggatagacattagctcagatggaaaacgccatttgtaattcattgctctcatttcagtatgatgtaaattcttctcctcagccttgtaaactgctaagtttttatcatatacaagaatccaatttatcctaactatctcttagtctgacacagcacactgctaagtgtagacagtagtccatgcctccacaggtggggatgacaatgaatccccacccccgcccagaaaaaacaaaaacaaaaacaaaaacagttgagtgtttggaaaaaccagagtattaactctgagtttttagagatgtacaaactaaagattagagatttcgtataccagtcaatctaagtttacaatctgtaaactcctggactctctctcaatatgtttgaatacagtcctcaaatgctttcctttatctacactgaaacattttcctaagcaaatatttggtgtctttagaaagcggcagcatggactgcatgctggctgttggagatatggaacccagcagagtgcagggtggaggatgagcaataaacgaaatcaacccaaaatcacttcaaggatttggaaccaatgaaggctcagacaagagcagcataggaattgggcgtctgacaaattacagtacaaagatgttagatgtaaagaactctggagtctcaatacgcacggcatcaagatgaaatgggagaagggaataaaagcagcagaaatatgccattttggcaaggtatctgggtggtgggttgtagataactaccaattagtacagctattttgagatgaacattgcaaagataagaaagtgatagcctagagctatgaaaaacattactgtctataaactctgtctcagtttctagtttataaacactttgagccttacttattcctttattctgagctacattctgacttctgactgtagcctactgagtttaggatattgtcataataattccgtcattaaaatctttttgtggaactatccatcttagcttttcactttgttgcaggtattagttcctgtttaattcattcagtggacatagtctcactctactattagctactttgttcttgtcgcttctcccatgctgctctttcttccagtcaccatccctaatcactccctacacaaaagaaagaaagttttagagcagcgattataataaataaataatttataataataaatgcaagaaaattttaataaagataaaatattcagtttggtttatcattccatacattatttggaaatacccttagcaagattagtatatctgaagtttaggcaaactacatgaatatatggtgacatttacaactgaagaggtatatagagtactatagtaattgcagaataaataaaaaatcagggatacttgcttttcttatttaagaaaatgtaaccagatatgtaaaaaattcttgattttacatattccatatacaattattgaaatttgcatttctatagcatctgctacaatagaacttaaacaacacatatctctggaatatataagttcaaattggaatactcaagctatattttaccaatgtttttttcaatcaacacaatggcatcacctaagccagataaagaacagtattttcactgagggcctgttagatgaatattttaaagttattttctacctctttacaaaacaaaatgcattttcttttatttaacttacagggaactttattttcatggatattcttcatttcttctgaaacgctttattgaaccaatatatatgagtgattttgtggcttaggggaaaatacttctcattcaaattcattttattttgctacagctctccaagcaagagaaaaaaataaagaatcttatgatacttaaaagtagatatagtttcaatcctaaaagagtaaaaattttagaaacgtctagactttactaagcctcattattaaaagatttccagagtacctgagtgagatctaatctgctttatttactccaaaagtactatgcacacataactacaaagaacagtataaaaatgttcaattaatatttcttgaatgattcaattcaccttctcagaagtttatgacgtttcttaaaaatccctacattgaaccactaatttgacttccttgtagctaaaacatacatttcattttcgtatacttttatttaaaaaatgtttattggaaagccttgcaatgtcacctgatgtttaatttcattgtgatgtgctatttgtctttaaaaataacacctaatattcataaacctggctaaatttaaaatatcttaatactcaaatattaatttttatattttccaatataatgaactcacccaatccattgttcacaaaccatgattgtgtacctgtctctctttctaaggaagacatatgatcaggtttactgcttcggccctttgaaaagatttttcttttttcactagcagctttcttttagggcagtgtttgagtgggactgtagaatggcaattgtccactttctggtagtaccagcattttatgtgtggtatgcagaactatctgtaaatcaggactaaaggtttgctttatcagtcattcagtcatagagtactttccaaaaggctataaatgtaaggtgaggaagaggactcagtgtaataagagtaagaaccaatataatctaagactctcaatcatggaacttacttatgccttcaagaatgactcttgtatgtaccactaccatgtggtgacccagtgttactgccactgtgcacatgactttgtagagtgatggatccggatacacccaggacctgatggggagctcaggtcacatggtaacttggtggggaatggttaagcatgtagcctctatatgattcagtaataaggtagatgctttttctaaaaatgagatacttatcttcaaacaatggcatagcttttctcccaaacataagcatttgcactgtattttatcatgacagtttgccaaagcctccatagagtattgttatttgctatagatacctcaccaactattttatcttttcctagaaacccaggggcagagcagcttgtacagcagaccagatattttactttcagcaacactcacaactggtagctttgagaataatcagtaaatgatatggactagcatgcccatatgaagtgtatgttgcctctcaaattcagaggtccaattgtcattgtgtttcttgttattgggagataccagatagagaaaatttattctttatcttagaaggaatgtcttgaaccatatttctgaacctctagaaatgttactgaacttgacagtttctggattttttgtatgatttactttctatcctccagaatgcaggtgtctcaaaagatcagaggagcatggtatcattaatatgataggccagcatgattttccaggtaatggagagatgttcaaagtccatggagaacagatggggaaagtggggaggatagttgatctatccctaagtttgggcaagtaaggtgtgttgctcctattgaaagctgaaacaaactacttcttatgatttttatgaacatagagacaaaagcattctccagatcaacagccacatactaggtgttaaaagttgtatgaggccaggtgcagtggctcactcctgtaattccagcactttgggaggctgaggtgggcagatttcttgaccccaggagttcaagatcagcctgggcaacatagcaagactttgtctctacaaaacatacaaaaaattagccaggcattgtggtgtgggcctgtagtcccagttacctgggaggctgagatgagaggatcaactgagccccaaggtcaaggctctagtgagttatgattgcgccactgcactctaccctggatgacagagggagatcctgtctaaaaaacaaacaaacaaacaaacttgcatgatacgtatgctttagtaaagatacattgggacaggcaagtgtgatataaatcaccagttaatttaattaatgacattctgtctttattctccaaaattattctagtgtctggacaggccaagtaggtgagttaaatggacaaatgtgcatgagatagtaataattagtcttgcgtcttccaagtcttttttttttttaagatgaagtctcactctgtcgtccaggctggtgagcagtggcgcggtctcagctcactgcaatctccaccccctgggttcaagtgattctcctgcctcagcctccctagtagctgggataacaggcacacaccaccatgcccagctaatttttgtatttttagtagagatggggttttgccatgttggccagactggtctcaaactcctgacctcaggtgatcctcccacctcagcctcagcctcccaaagtgctgggattacaggtatgagccactgcgcccagccatccttcaagtcctgatggacaccaacatttgcaatccatccaagcataagctattgtttttggcttaatattttagtaggcaggagtacttccggggacatccactttacttttcttaatataaatgtcctatctgcaaagatgaggtgataaaagttttctgtagtgtgtgtgtgtgtgtgtgtgtgtgtgtgtgtgtgtgtgtagcaggtggaccatagtggtattttgcatctataggattttatttaagctaagagccagtatgtagtatattagcatgtttagttcaatgagttcatgctctcaaatcacagtatatcaataatttgtgtgtcaacacacacatgcataatttataaaaatgaattagaatataatgagcattttgaaatgcacactccatttcatttttaaataatatttccttagaacttcttttttaattttgtacctcagatttttctaattgaaagattttaaccatgttatttttcatacatttgaccaagaagagattgtttaaaatagtatcttaaactaatagttattgggacaatttaaataacttattgggtgcttatgttatacatttctgccaaaaacagtattaatcgtgcgcttaatttattccagaactttcactaatgtggaagttgataatagtgcaccaagcaaatgagcttctttctcttactgcaggtaagtgctattaataatataagcctgggatgagtaagtagctttcagcaaaatgtaaattaatcattgcttctttcacttgaaaagacttactattaaaaagcaacataatcagaaataagcagtgtacttattctcctaatctcaatgagaaccacactttgattagcagtagcctagtttatatacaatagaaactagcagtactctcactactggtgtcaaaattatagtatgcgatgtaattacaatgtgtgggttcctctggccccaaggactttgctagtgttgtttattctgcctgtttgtaacgtctttccaattccatagtttagttaactctactcatcttttgagacccagtttctcaaaggtccctcttacaacttcagagacaagatcattcccttgtaattttgtaagatctcttatccctcagtagttttctttacaatcatttatcaaagcttatgcattacttatgtaattatgtaattgatgtatttattgctattatcctcaaacgttccaagaataatagctaatatttattgaacaacaataccatgtcaaacactgggatcaaatagtttacttgtgcatatccctgtcattctctgtgtatgtatttgtgtgtgtgtgtgtattaatttatgtatgcacatgtacatacatgtacttatagatacctatgtctgtatacatgaatatcccatatacatgtgtatgtatatacacatatacataatctcatttaatgcaataacataatgttaatgaatttgtaaacctagagttaatacatattaactccaaaaaccaccaatctatatgtctgaccatttattctcctccctttgcaaatgaatgtcccttggaatggctattaatgggttcaggggaagagaatgagatctgtcacttaggacctcgtagtactgcaagtatacacctacattagaaaatttaataattctctacattaatatattaaaggaatgaaaagagccacctagtaatctcagtagattaaaaaatgaacattcactaaaatttaatgcacacttaaaataataaaaatattaaattgtaatggaaaaaaccttcctttttataagctagaaaatatattagcaaaagtctaaattaaacatcaaattaagggttaataggataaacattcttattaaagtcagaaacaagcaaaacatccattataaactacattatgcattatcattctgaaactctgagccaacatgcaagtaaaaggaaaaaaaataggtaaattaggaggacaaattggttaggaagtaacaaatccttgatgttttcagacgatattattgtctaaagaatctaaagaatcagctgacaaattgaaggtactcatagacagtttagcaagatcaatataggatttatttaacaacttaagacctatcttatgtgcctgtattattctataaaggaaataaaaacaattaagaaaattattttaaatggtactaaattacatctagcaggatatgtgggggaaaaaagtgttctgtgggatgccataatagctaacaattattgtgagttcattttgtaaaatgcactgttttatattctttgcacagcccttcttcacccttgctaaaatcatatacatcagaaaaagagtttttttgttgctcaaagtcgtaaaattcataacgaaaaggcaccttggtggaacagattgagagaatctagtaaatatcagcgacacaaatcccataacttagcaattctacttcttttatattaattagagaacaagtcaaatatagacatgaggaggaggttaactacaaattacaaattatttgtaatgacccccaaaaaggatgataaaaatcattagcaaaggggaatacataatttgagaattctcaacaccatgattttattatccattagacttcaatggaataggatgaagtatatcattcatatgcactgatactaagaattacctagatgtagtgtgaatgaaaaagctatttattacatgttaaaataataaacgtattgaaaacatcctgtcgccaagcattgacatatctcaagtcacatatgcatatatatgtaattgtgtagtcagaaaaaattctggtaagaaaccaaacagtactgtaataatagctatctctgggaagcatactggactgggaaaaattttaaaggaacattattttcacttatgtaagctttaaaaataaaaatacgtattaccaggccaagtgcagtggctcatgcctgtaattactttgggaggcttaggcgggtggattatcagaggtggggagattgagatcagtctggccaacatgatgaaacctgtctctactaaatacacaaaaattatctgggtgtggtggtggatgcctataatcccagctacttgggaggctgaggcacgagaacttgaacccaggaggcagaggttgcagtgagccgagatcgcaccactgtactctaacctgggcaacacagcaagaccctgcctcaaaacaaacaaacaaacacacaaaacatatatatatatatatatatatatatatatattatatatataattgcatttataatttaaataattaaaatgcctctaatatataaggtaaagcattcactttcttatgacattatttaatgtcataagaaaaagtctttatatatctatgaagataattttgactgaattaatgacatgttttataaaaacaaaatttcaaacgtagtaaaaaaattgaagtctaattaaccttaaaacaagaaaaaaatatgaatgaaactctagtcaagtaaaacaaaatagaagaaaaagcaaccgacccatcaactctttacctccaagccttcaattacagatacttttatagccaggttaatttaaatatttaaataaaaaaaattatgctctctaaacagatattaagtatacaagaagatataaattacttctgaaagctaatatcaataggtaaaattttaagaataatataataaaatgaatacattattccttttatcaaagtatatgcaaaacatgtaatcaaacctaggtaaatatatatttatagaataatctatctggcaaatcgtatatattccaggaatgaaaagatgctttactatgaaaacatatgtaaataagacaactcattaattaattaggtgaggttaagcccatttataggtgtgatagccccagtttcaggcaggtgctggaaactgaactagtgaacacagttaactagtttcagacactgcttgctagtgagcaatctgtatgtggccaggattattttttatatgctggaggtttcataggaatacattggtagactgcggttcttgataaatggcactaacaagcagaaactgataattctggaaaacagaatacatacatactaagaatgagtcaatatttgcatacgttcttttataatcacaaaatcttgctgtctacctaaacttcatgggttaatctacacagactcatattttcttttttttttagctcataagtcattgatacatcaacacagaagttaaatattgagagaaaagttctaggacaacttgaattcataaatagtgcaatccggaaaacataaaatccaaatattaaaccatgaaataaagtcaaagagcaaaataattacttacataataggcaagatggattcaaaattcacagcaatttagaaaggttttggatgcatcatttatttgtgattccttctcagctttagtgtgctcagaacatactggaaaaccttacataaatagtagcagttatgatccccacagtccttgttctgctgaagtcgggatcttatgaaagtattaacttggaaggaacaaataattattttccattattttatggtaataacaatgaaactttcacttataatcttaaatttgactagactttaaggtactcatctttttactgttaatgtaatgaatgttaaatacacagtaaaaactgtgtacattttaatttgcctaacgaaaatttgttttttaacctatgtggaaaaatataatgtaaatttcttagcagaatatacatatctaattttagctacatgagatatttcatcataacttcttgcagaatttcaaaaatgtataaaaataatgaatgtttgagcaatggattatataaaatgtggttttcatctccaagtggttctgataaaacattactatcaattttaaaatattgagtttggttgggcgtggtggctcacacctgtaatcccagcactttgggaggccgtggtgggcagaccacttgcgatcagaagtttgagaccagcctggccaatgtgatgaaaacacacctctactaaaaatacaaaaattagctgggcttggtggctcacacctgtaatcccagctactagggagggtgaggcaggagaattgcttgaacccagcaggtggaggctgcagtgagccgagatagtgccactgcactcaagtctaagcaacagtgagactcggtctcaaataaataaatataaaaatattgaattttaccactaacatatgtttacttgtacatgtcatttctcaacactattttaacaatataaaaaagacacaaatattaaagtttaaaaatactgagataaatgtacaattttaaatgttttattttcacaaataaaatatcatgtattcaaattcatctttaaaacacttagtttaagatgataatataattatttgtgaacacgattttcatttcagtggatttcaaaattttgttctgattacaattaaaaaatatattccaaggacatttgaatataaatcaaacaaaagcctctttggtggtgcttgcttaaatggtctcattcattctccattttcaacttcgagctatgaaaacaattttaaaatcgaagttcgtacatttccatttctccagtgtcaactagtcaaatattactcaaagtcttatttcatatattttatttatcaaattagaaagtgctattttacaatattgtaaatgttgagacatgaataaatttatagttgactgactttctaagttttacagttttctttttgtggtcagccagtaaatgtctgtgtattttaagttaatttaatctaaatgtccatgttattatttagtcattaaaatagtctactatttaaatatttttgaaacaaaaccacaatttttatgtctttttttttaaacatacaaaaaagagcaatgacttatagtagtctgaaagtaatgcgtttcagacacctgatagggagtgaatcttgttttactaactgcagctctttcattttacccttcgataactccttaacatctaacacgtgataacctaaagtacaaatagtgagtgtgacagtgtcaattcatgctctgaatattaatgatacttaatattgttttaaaaacagcttaaaaattgtaaattctaatatttccttcaaaaaaccagcaaaaattgttgggaagaatgtttcccagtagtaaacactggatacttctaggtaatattttgttggttggtttgctctttcttttattgtagagttattgcctaacattttaggactagtataatgcttttgtaattaaaaatatgcaatctcggccgggcgcggtggctcacacctgtaatcccagcactttaggaggcagaggtgggcggataacgaggtcaggagatcgagaccaccctggctaacacagtgaaaccccgtctctactaaaaaaaaaaaaaaaaaaaaaaaaaaaaaaaaattagctgggcgtggtggtgggcgcctgtagtcccagctgctcaggagactgaggcaggagaatggcgtgaacccgggaggcggagcttgcagtgagccgagatagcgccactgcactccagcctgggcgacagagcgagactccacctcaaaaataaaaataaaaataaaaatatgcaatctcttaaacataaatttggcttttattatgagaatattgttgaaagattcagtactttcaatagattttaaaacactttaatttcatttcatttaaatctcactctgcaaaataaggtaaactattatatttatttaaaaataatatgattagaaaaaaacactgaactgcaaaggattattattgctggaggttttttatatattattccttgttacaaatacatggaaaagtcattggtactgacaggactaagattgaaaaaccaagtccccactgagttggcttttacagaatgtaactggcgagagtctgttgaaagtcaccttccttgattccctacctttatttccaagtggtgaaaatcattttaaataggctccaaacacattgatgagtgaatcaatcatctataacaaaggcatgtgaagtatatttaaggaactatatatacacaagcagtaaacatgaatgtacaaagggcaacatgaacattgtaaaacagccaattattaaattattatgtaaactgttttcaacaaaacaataaataccaagttttgcaaagtaaagacgccattatttctatttcaaaaaacctaatatctgaatctgaaatatagtaaaatacctccgatttctggcttactatatcacattttttccccaaatttatgtgttatatttctgtaaagtagtaagagctgtgagaccattagagaattaaataaattcacaaactaacttcaatggactgatactttattagggaaatggcttgactcttaactcagggacaatattgcccaaaatgtattcagtaaattgatggcatcagaatttaggaacataaattaacttaccaatttttgtatcttctctcagacctaatgaattgggatttcagagggtttgaggcctagaaatctggatttttaataaattccttaggtgattctaatgataaccttaactgagttgtgattttgagttttgttgaatcattgcacctcttatcaccatattttaactaatctcatcttcagaattaagaagatagtctatttacatttcctggtggtcaagaatttggtaccgtattaaagtatctttttgttaattagagtacttgtaggatttaattagctgacatttcatttaaagtagcactttccccaattgtttgctactgtagtttttatcagaaactttgtaatttaaagtatatttagaaggaaaattaaaagaaatgctatgtttagatataagcaatttataatatccatttaatggcacaaatgtcttcaaatttgcaactgcctgcaagttagcagactaggtaatctccagttgccactgaattcaatgcgtttttttacctgtcaccaaattaacaatcttaaatccttaatttcatcctttcctcccagaaacttgaataatattccatccttctaattctctatttcaagatcttccatattcaggattcatttacccaaagttaacctcattattcacagtataaatcaccttatgtaagcaaggtagtctgtttcattattttggcacgcaccttctcaaatttaaaatatttcctttgttttctatcttggttaaatgttcctttgttttctaccttggttaaaattgtaattaaattgaaaataatagttctcccatttgccttttagttatttttttaaaaatccagcttgcctttatttatatatccacttcattatttactcataatgacattctattttattttattttagacaaggtcttgctctcttgcccaggctaaaaaaatagtattatgcaacagcattttttagaaagaaattaaggactccaggcttgctaaaaattaaaattattatatttaaggtggatattatctcatgggatgcactttctattttgggtctgaatcatatcttatttaacatatgttcagtagttctatcacatcgtttagaaaataaaacaagtcaaagaaatatattgcctaacactgttttaaatgataacaaacgaacaaaacccacggagctctgaccctatttaaaaaaaaaacaaaaaaacccaaaaaacaaaacacaaagcttgtccactttgaaaatatggatatagcttttcatgtcacattattcttagtatgtctaataggtctactttaaaagcaatacattattttattaaaataaataaaacaaaacaattattaataattaattttaataataatcaataataaaataaaataaatatcttttctaagtactcatatagtctgatatatgagttttataattcatgcttataagtaaacatttatcatcagaaaaaatatttatcagaattgcaacaaattatttttggaataaagtatatgaagcagtgacattttgctccattatcagtaaaattatcataaaggataaggcagttattaggaattgaaaactatgtaggatttgtaaaaagaagagggatagcaccacatactaaagactcagtgaaacaaaactacagaaaagtttggaactttctgggataccaaaaaattttgggagggtaaaatctgataagaaagcagaattatgagagataaagcgaggccacttatttgttcagtaatcctttcctttattctaaaatcataatttagtactttctaggtgccaagttgtttggtaggaattaagaatgaacaatcaagccacctggtcccgggttttctttgttagaaagttttcttatttattttatgattatcatttatttctgattaaaataccttactagttaggagttggttcaggttttctatttcttcatgagatagaagtcatatattttctatttttaggaatttatccgtttcttctaggttctctttatccaatttgttggtgtgcaattatctacagcagtgtcttatggtgcttgttatctccgtggcatgagttgtaacgtctcctctttcatttctgattttgtttctttgaatcttctcttttctcgtagtctagacaacagcactgtattgtatatttaaaaatgtgttaagggagttcaccttatgttaaatgttcttaccacaattaataaattttaaatgaaacatacaaatttaaaaacgaagaaagcacaggtgaacctagcaactaatcaaatctatatttgtagcagtgataaaatgatcaaagtaatgactgcagacaaaagttgcaaagtatgaattaactaggcttagtgattgattgaggcagtggctagaggtgccatatgcttggtgtatacaaggaacattgtgaaggctggattgcttggagccaagaaagcaaagcaagggcagtgggagatgatatcaaagagggtcactgacagaatctatattatattataagctatattatattaattatgtaatatgttattttcatttctagattatttaatgttttattataatttaataatatattattttcatttctagatcatacaaatgcaatgtttatttaaaaaataaacaaaaataaaaccaacttagaaaatatatcataaaaaattaaaatatctacattattattatatctaattcatgttgtcacaaatggcagaatttgtctttttttgactgaatactgttccattgagtatatatggcatattttgttgatccattcattcactgatggatgcttcagttgattccatgtattggctattgtaataatgctgccatgaacatgggaatgcggatatctctgaaatactgattttatttcatttggatatatatctagaagtgggactgctggatcatatgagagtttaatttccagtttttttaggaatctccatataatcttttttcataatagctgtactgatttacctacccaccatagggtacaagggttcccttttctccataaattttccaacactttatttttcatagttttgatagtagctattctaacaggtgtgaagtgatagcacattgtgatttaaatttccctgatgattagtgctgtagataattttttatttacctgttgatcatttgtatgtctcctactgagaaatgtctattgagatgctttgcccatttttaattgggttatttgttttctcactattgagttgtttgcatacattatatattttggatattaaccccttattgaatgtatggtttgaaatttttttctcctaatccaaacgttttctcttaactctgctcatcgtttcctttgctgtgaagaaacattttagtttgatgcaatcccatttgtctattttgcaattgttgcctgaacttttggggtgaaattcaaaatatcgctgccgaaaccaatgtcctggagctttcccctatgttttcttctagtatttttataatgtaagatcttatgttgaagtctttacttagtttgaatttttttgaatgtaaggtattgctgaaaggtccatttgtctacatgtgtatgtcaagtttttccaacaccatttattgaagagactatcctttctccattgtgtgttcttggcaactttggtgaaaatcaattgactgtgtatgcatgggtttgattttcagccccttattctgttcccttggtcaatgtatcctgcttttatgtcagtaccatactgtcttgatttctacagctgtatcacataatttaaactgaattagtgtgatgcctccaggtttgttcttttgctcaaaattatttagctatttatggtcttttgtacttccatattaattttatcttttttctatttctatgaaaaatataattggaattttgatagaaattaaattgaatctgtaaatcactttgaatagtatggaaaatttaaaattaatttttacaaaacacgaatattggatatctttccattgatttgtgtcttattcaattactttcattaatgttttataattttcagtgctgatgttttatctccttttttaagtttgttcttattttatttttgtagctattgcagataggatttatttttgatttttttatgatagatcacttttaatgtatagctgctgggtatttttgcatctatattcatcagggatattggactgcaattttcttttcttttagtgtatttgacaaactttggtaacaagataataatgctggtgggctgggcgtggtggctcacacctgtaatcccagcactttgggaggccgaggcgggcggatcctgaggttcaggagatccagaccattctggctaacacggtgaaaccccgtctctactaaaaatacaaaaaattagccaggcgtggtggcgggcgcctgtagtcccagctacttgggaggctgaggcaggagaatggcgtgaacccgggaggcagagcttgcagtgagccaagatcacgccactgcactccagcctggacaacagagtgaaactccgtctcaatgataataataataataataataataataataataataataataattctggtgttgaaaatgcatttggaagtattactttcatttagattttttggaagtttctgaggatttgtatcggttcctgaaatatttggtagaatacagcagtgaagctgtaaggttctaggcttttctttgatggaataattgttgttactgattcaatttctttagccgttattcagtcttactgaataatttgttcaaatgttcttttcttcatgattcattcttggtaagttttatgttttcaaaatgtatcgatgttttaggttctccaatttgttggcatataattgtttacagcagtctctcatgatcctttgtatgtctataatatcagttataatgccttatctttcatgatttatttaaatcttctctcatttttttcttagctagcctagagatttattttatcctttcaaaacaataacgcttagatttatttatattttctattgttttcctagtttctattttatttatttattcgcttctttattattttcctccttataccaatgttgggcttagtttgttcttttttctgtaattctatgatgtgtaacagtaggtcgtttgagctctttcttcttttttggtggtactttttattgcaattaacttccctcttacaactccttttattgtatgccatacattttttctatgctgtgtttctatcttcatttgtctcaagatatttgtaaggtttcttttaatgttttctttacttcattgcttgctcaggagcatgttgtttaattttcacatacttgtgattttttctcccatcactgattttaagttttataccatttttatcagaaaatatacttggtgtgattaaagtcttcttaaatttgttaagacttactttgtcacttaacatatgatctatcctggagatgtccagtgtgcttgagaagaattccatttgaatggaatgctccatatatttttgttaaatttatttagtctaaagtgtagttcgatgtttccttattgattttctgacttgatgttctggttgattgtttaaagtaggatattggggcttcctaatataactgtgttgcagtctatctcttccttcagatctatgaatatttgctttacatatttatgtgctttaatatagtttcagacaatattatttggggcatgtgtgtaagtgcatatgtctgaatgtgttttaatatgaaaagatatattagaatctatctctttcaccatgactttctttttgtctctggattatttttacaaactaaatattcccttgtctcttagggcttacagtatgatctatgatattcagtaccctggagagcagcacaatatttcattgccttgtggggtaacatcaaagagaatagagaaatgcaatgaaaaatgacgtataacaaatctaatactatctatgcttcacctgattctataactacagaaatatgggagttcaatttataaactgcaaatgcagtttaataaattgtcctttaaccttataattttccatattggttgatttctgtctctttagttgcattcaatctctttgcaaatatccatcttttcagtttaaatgtcttttgtctgaggaatccaagtaatgattataaactgttttttttttttcataaaagaggcgatagaaaagctctcgttatacattaaactcttcaattttcactcagtcatactgtagggaaaacactgagggcagtgaatctgagtttatccaaaggaaaagtgatttttttgtctgaaatgttcttacaatgacaaaatttatatcattatagaaagtgttcttctgtccttttgaagttggcagcatttcaagttcacattataaaacaaggacttcagaagaaaggaagactttaggtggtgaaaactcacacaacatgaaaacactaaattatttcaaggctgtgtatctgtaactctaaattagtactgttaagttaccacttgtggaaactgtttgaatattactaaagagtcagcacagtagtagttgttttgatgacaacatatttagaaatatgtaaaatattcaagtcatcatcaacaacttcttaatgaagtatctataaaaagccatgtgtgttagtaataaatgatgatcagtgagaatataatactcatgaattgcttgacaaagaagcacagaaaagagctatagactagtctgagcagaaattatggaagaagagatttcagtttttatggcccattttgaagcttctacagtgggtttaaacattctcttggtatggaactattttaagaagatttgaaagtgtgatgttttattatatttatccaaagtggattcaagaccatttataaaaaatggtcttgttgtcttctgagctatttccaaagggatgcagtttttaaaagactaagcaggttggagttgtaaatgaagtgcttggtgaaagatcattattaaccttgcctttgaaattgatggagaagtgatgcttgagccttaatcactgagctaataattcacctttaatcaaaatcagtgcttaatattttgtataactgtgatcactgaggttattttcattgaactgctaccattccacactttcctgcactaaatttctgtgccaaagaacttctgtggatcttaatttaagaaacaggttttacaggctgggcacagtggctcatgcctgtaatcccagcattttgggaggccgaggtgggtggatcacgaggtcaggagttcaagaccagcctggccaaatggtgaaaccctgtctgtactaaaaatacaaaaaaatagccagatgtggtggcacgtgcctgttatctcagctaatcaggaggctgaagcagagaattgcttaaacctggggagtggaggttgcagtgagccgagattgtgcccttgcactccagcctgggcaacagagtgagactccatctaaaaaagaaaagaaaagaaaagaaagaaacagtttttacagtgtctgcttttctctattgattttgttcttttttgtttacctgcttagtactcagtgtctttctagtttatgtatattgtgctatgcttatccccaagttgctggaatattggatattgtccttcagtggcagcctgtcgatggattcctgttgttcgtaaataagactcataaccctcaatgccattctgcgtagatatcagaatatgggcttcagcatgcatccccgaatgttgtttcctgcctacatgttggtatctgttgctaaatcatctcaggcctcagaggttcctctttctggcagtgataagaacaatgatgcaagcttcagactgttagtattctttatttggtttccagctagatgcggtcaactgcctcttgtagttgataaagctctcctcattgcctctcatgcctcattttggtacctattttagctgaggtaacctgcagtatctagttgcttaatttataaaaaaagaatgtttttattaaaaaaaggatccagtaatataatgtgatgttttagagcaatgcaagatcacttgattttaaaagtatctagagattaatgaataaataagttaataattgaatgtcatattattgccataaaatatttaatgaaaacatgtgaagtctcattaaatatatttagcatttcagaattctcatatttgcaatatatacaaatatgattttacttatttgaaagagcagagaacaattctttgacaggttcttagcttagctttccaaaactatggatgtggtcatgcacaaaagaccacatccatacagacacacacatttctgtgttcatactcaaagtaatatattcctctctatatagacatatatacacttttatacacatacacaaatatatcctctcattaaatctctggaaataaaattatttatatcatattagatataaaatactgattttaggtaacatttgatgttcatgaggaataaccaaaataaagtgacctataaaagttccctaatattaagagaaaatctatatgcattaatttattgtttctttcaaaaacatatttaaataaattcatggagatcatcatgacattcttctgtacaaatcggatactgacaaacaatatcaattttattgataccaggagataactttctgtacaaaggttgagggtgagggggagagaccagtcttccatctcctcaagtcctccataagacaccactgctgcagctaacactactttcattgtgaagacatggaagtcctagaaactccacttcacattcttaggaggtatcgatatccgtttggcctttcaaactgttcaatctatagccctttgtgtgtcagcccaccaggtagaggttagccctactataatctctataagaatgaataaacctaaggacatttcgccaggcctaccttcgtactaacagatttcagcagcaggtatccctgagttatatttttacatatggtatagcttagaaatatatacaggtatataaacaaccacacaaaagcaaattagaaaagttacctcttcagccttaaaatggtgtatttgtgaaagtaaacttcttggtaaatggaataaatgagctttaatatatacgatctgtaaattcaggagatactataaaatgactttaaaatcagcatttaatctgttatttgaaaagtatttttccagatttattgtttacaaataacctaagaagaatgtgtttatgataaacattggtttccttttgttgctataatacgtgctcacaaatttagtaacatacatcaattaacaatttattatcttaaagtgctggaggtcaaaagtccaaaattaccgggctaacttcaagatgccggcggggctgtttgcttctgaaggtgctgaggagacagtatgtttccaagctttttcagcttctagtggcatctgcagtgtttggtttgtcaaccctccatgaaagggcatcacttcaatcttggcttcagtcatcacatcaccttccccactgattcctcatgtgcccctcttataagtaccattgtgatgcttgggaccaatgttgataattcacaaaaatcttccaatcttgagatccttaactcaatcctatatgtaaacttccttttgccacagaaggtaacattcacagggtttggtaattaagacgtggacatatttggaaggcattaatctgcttaccacttggtggccgtataatatatacatttataaaacatatgaaaatcaatttttttgtaaatgtatgaatttgtttccacaccctttatcttatttcattggtagatgtgtctgcttatacataatttgtacacttctgtataaattacatttatgtatcaatgtacatttatgtataaattatgcatacgtttatttatacatatacatttatttatacaaccattatgtaagtaattataattacatgaaatgacaaactgaacataagtaaaaataaaataatttgaataaaatgcacataatattaatatctgaggaaacaaatatataatttttagattatcaatgttaacctagtaaaatcttaaaagtgtgattctgtcttacatcaaaatgataaaaatgagaaattatggtataatatggataatttaaatgataccagtatcaggtaattacttcctgattattatatatattaatataactaaaaagcagactcatgtacacatattttctaaatgtaagctatgcaataaacctattagacagatattttccagtgattaaactaaggtttcaaaactttgaaaatataataatagaaataattattaatctaatgctagaatttacatccctttgttgccaatactacatctgatgtgagatagtcccgcaacccttgatattaaacttagcaactaggacttcgatatacagtttagcttcttattagataattttgaaaaaatgggactggaaagagaatgagatgaagataaggtaaatctcgacagctttattagaaattgattttctataagtttgtggatttatttatgaactctatatccaggtccatttgttgatgcatatgtttgcatgccagtatcatgccgttttgactactataattttgattttgatatcaggtagtatgatgcctccagctctgctctatagctcaaaattggtttggctgtttggggtctttaatggttccaagcaaatttgaacattgtttttcttatttttgtgaaaaatgacaatggaatattgataggcattgcattgaatctatagattgttttgggtagtttgtacatttttacaatattaattcttccaatccgtgaacataagatacctttctctgtgttttccttaatttctttcattattgttttgtagtttttattatacacatcctccacttccttgattaaatttgaccctgagtattttatttattttttatttgggaatgctttcttaattattttttccagtaatttgtgtttagtgtatagaagtgctactgattttatatgctgattttatatactatcactttagtgcctttgtttataagttctaaataccatttggcccagtgatcccattactgggtatgtacccaaaggattataaagcatgctgctataaagacacatgcacacatatgtttattatggcactattcacaatagcaaagacttggaaccaacccagatgtccatcaatgatagactgggttaagaaaatgtggcacatatacaccatggaatactatgcagccataaaaaaggatgaatttatgtccttcgtagggacatggatgaagctggaaaccatattctgagcaaactatcacaaggacagaaaaccaaacaccgcatgttctcactcataggtgggaattgaacaatgagaacacttggacacagggcggggaacattatacactggggcctgttgtggggtggggggagtggggagggacagcattaagagaaatgcctaatgtaaatgacaagttaatgggtgcagcacaccaacatggcacatgtagacatatgtaacaaacctgcacattgtgcacatgtatcctggaacttaaagtataataataaaataaatacataaataaataaataaaaaatgtcaaaaaatagttttattggttgagtacttagaatttttatgctagaccatattgtcaaaaaacagaaaaaaaaatcaatttttcctttttctcttaggatgcctttcatttctttctcttgctcaattgctctaaggtttccagaactatgttgaaaacaagtagagagaatgggcaaccatgttttattcctgatcttagagaaaactctttcagctgttctcatttgaacatgatgttgactctgggcttgccgtatatggactttattgtgcttcggtacattcattctatacataatctgttaagagttttttatcgtgaaaagatattgacttttgtcaatttatttttctgcgtctattgatatgctcatactaattttcaataaaagtcccaaaaatattcaatggagaaaggacaggcataaaaatggtgttgggaaaactatatatacacatgtaggagaattgattggatctttatcccttatcacatccaaaaataaactcaaaattaattaaagacaaatataagacacaaaactctaaaacttccaggataaaacaaagggagaaagtttcacaatattggtctgggaaataatattttgggtttgactcaagaagctcatgcaacaaatgcaaaagtagacaaatgtgaatacatcaaattaaaaagcttccaaacagcaaaagaagcaatcaacagactgaagacacaactcagagtgggagaaaatatttgtaaaccacacattcaacaaaaggttattatccaaaatgtacaaggaatacaagcaactcaatatcaaaaaataacatataaaccaattaaaacacgggcaaataatttaaacagacatttctttaaaaaagacatacaaactgccaagttcatggaaaaagtcttgatatcaccaagcattagggaaatacaaatttaaaccacaatgcaatataatcacatacctgtaagaatggctttataaaaaagacaaagggtacgaagttttggtgaagatgtgggaaaaaggcaaccctcgtacattgttggtagccattacaaaatacctgcatggaattatgctgtgtctagaccagcagtttttaaaatgaaatagaaactaataaaattgaaaaaaaaaagaaaaaagaacggtaaaaataattttgtgaatatacacgcatacacatctgtactgtatagaagtgtaaaaaccgctgttcaatgtggattgcattcaaaagtataaatcccagtgacctaaatgataccattaaagctttctaccacaacgtaaagacccttcataaacaagcattggaacaaagattcggcatcatctcttgcaactctgcttccttgtatggtcccaaagtcttgaattagtcacaacttcttagaatcattatgatgtgtaggtttattccagtttgtctttaatatcttaacactgaacataagataatttatagattccaattaagataatttggtataattaatatatttaaactaacgtaatttatagacttagataatctttcaagataatattctatgccagtggttttcaaacttgaacctgcctcagaattacttgaaaggtttgtttaaacacagacagttcgaccaaaatccccatactgcttaatttagtatatctgtgattaggcctgagaatttgcaggtgatgttagcactaagattccaggaaccacagttacaacaggagaagtgtctctggcctggtttctggatttgagtatgtatttattatagacagactcatctttcacataatcatatattgtagtataattgtctggttttttgctctcacttaagacagtagaaaaatgtgaaagatattttgggcaagaaacataaattttattcttccatttggaccacctaactaacaaaacagagagggggctcaacattctttattaaatgccttaatgaaaagcttaattttgaagactttcaccatatttatcttttaaaaatttgctttcattcatttaaaatactcaacaggaaaagagcccaataacatattaagtgcagttatagcttcctcacatatctggtgagtaataaaatgcctcagaggcaaagatgagagcacagagacttatttcatggtcccgttagctacatatttataataacgagagacattatgaagacatttctaaaagatattctaaaagccagtctaaatgtcagacaaaatttttaaaaatctagtattcaagaggtgaagaaatgtttagaatagaatttaagttaatgtcacaataggtttcaataatgttacaaagttcattcctagttttgaaatgtctgtaaaaataaaatttaaaagaaaaaatagtatgaatcaaatttacgtttaactgaagaatttgaaagggactgtgtattttactttataaatccatttcattgacagtttcttgcaacatacgccaatcatctttactgtactatttactaatatcattgtcctagcttcagacatgtagctacaaatcagataaaatatatgcaatacgcaactaaatgccatttgaatataggtagaaattgtagtctatagaataagatgactatggagaatctgatagttcaattaggcaatgtgagtgggtaaggaattaaatttatttttttgcccaaactgggtgacaaaaatagaaagaagttatcagtgaattgtgtaaggttatgtattgcaaaatgctttcaattataaacatcagatttcactattaaattaaaatatagattaaattactatttaatcctaaatatttactatttaattactaaattaaatagcaatttaatacattaatttctattttaatcactattaaaatatagattaaattactcagatatgtgaaatcaattggagagctcaggcaatcctagagaaacaaatcctacatatgcagccacattcactaagagaaccagtctctcccatcactaacctcagttgttagactcacattcatgccacctctttcatagtcaataacttgttcaatccgaatacctgttactaactgaggagccatcccaatagctgatagtgtccaaaacaggacatttcttgaaaatatatgccaacaaaatagatgcctgacaattttgccaaaaaaataccaaattaatctcgtgcccattcatgtggtgtgatctgaaccccatctgctggcctacaagggactgtagaaaaggtaattattagtatgtccactttttcatacagatccagtttagaaaggatatgcaatggatgtttagcaaacttaactagagcatctgcagcaacctacatcttaagtgctcaatatccacactttaaatcaatagcaacagtaacattatctgcctaatgcaactattcctgctaaaaacacacagatgcgcacaaacttccccccccacacacaagcacgatagttctataaagtgatgccccaattttcataaattgtcagtgtattttctagttaaatcccaatctcatcttgaatttcataatgaagtggtgaaatgttacaattaaaatgagaggaatctaatcataatatattttaggggaatctatagagggaacatgaacatttaaccacatatcagcatgaagaagaaactgtgggacatcctagtgtacttatgatgtactagtcatgaattcatagtttacatttagaatgtcttattccggtaaccataccacatcgacttagcatctgcatatcacatcagatagtggaacttttctagctgtgtcctttggtgtttacacttatgtcaggatgagtctattaacttttatttttgaaaatacagaatatttggatgtgtcccatggaatcatggggattcagaatacttctccctgcctccatcaaattgtgataaaattatatccccttgataaataaagtaaattttgccatttaacaagatgtcctccttttttcttcctactggactggtgaaatgaatatttgaacatgatcaggaagaagagttaaattctagctttctgagttaacattgtttttctggtagaaacattctccatttgatatctgctcttttataagactagatgctcttttatgatagggtaaatgataagacgtgtgaatatcatcagcacattgatggatcagcatatcgcctcagtaatatagtgaataatggaaaattatgcattcaggtttagatattcaccaatagggtagttgacagaagcaatacagaaagaaaacacaagtaagtaatcagaataaactgtatattcagcaaataaaattgctggagttggtttaatatatttgacttgtcctcttagttattatgactgttattttatcactggacagagaaagccatatctctggggacatctggagactgctactgagtctcatttaaggtaaatgctactaaactaagtaatactttacaatatggtggtgttgcgggctaaatgtttgtgttttcccaaaatttttatgttgaagccttaacccccaatgtaacaattttcagagataggacctgtgaggaagtgataaaggttaaatgaggtcataagaatggggccctaatctgatggagctggcacacttacaggaaaaggaggagacatcatataactctccaccaggtaaagacaagccaggaagagagccattactggaaacctaattaaacagcatcttgattttggactttgcagtctccagaactatatgggaagtaaatttctgttgtttaagccatccagtctgcagtattttgttgtggtagcctgagctaactgatacaggtgtataatctttaaaacttctttgttgggatccaggggctttttgtttgtttttttaatttatggctaacaggttaaataatctaataaacagccttattggccacttgaccagtatagcacacaatatcttgctgtaaattttgccaaagctctctggaaaccaagtccattgcaaaaatatgtgtttttcctactctgtaggcaaagagaatccagtgaaataagatggtgatctaaagagctgtgcctggaactcactcgggtccctcatgtcgtactctttctcctgctaaacaacatcatttccttttattcaaagcttttcatgagtatgctgcttgcagtctttaagtcatttgagatttctgagtctgtcacactgttagaggtaagcaaatgtagagagtaagctgtagtctgtattgctgacatattaacttagcctatgatgttaacattagtcttgattgagtgcatctgtaactattggaaagaatagtcgtaactggaaaagaaagagattgacagccactactaaagtcaccttttacaatgaatttttatgacccaattccaagtgtccatacacaccccttgaaattaatgctttgtcaagaatctctcatgcttgttcttttcgtatcctaaacaggtaagtaaacccttagctttaatctcgatttactatacagccatgccaatggtcatctgtcttactggtaaattgactaatcaagagtactatttaaattgtgcctagtggggagatttccctcttccgcttttcttcaatatcactcctgagctataatgttctaattgtccctttctcctctgtaattttgttactggagtctgatactgaaattgcagaatcagcttcttgataatctagagatgatctttgaatatatagagatctagagatactttaaataagcattggattcattgggttatccaggtcaagtgatagaactgttctactgctggctggacctgctttgagatcattgctttgctatgaatgccatatgctcaaatgtgaaatattttaattttagaatatgatccattagctttcttatgggtaggaatttaaattacaggtttttgctttttatcttcgaagggggaattctaaaatttgccagactgtttcactccagaaaagtcattgaatgtcagatcctaaatttctataggattgattgatccaacagtctctgggacatattcatctaaatatagcacaggtagcttctacatctgctgtctacattcacagctgtataatatcaacaatgtagtcaacgtttatatgagatagtgagccagtcaatatccctgcagattaatttagggaacagagcctgaggcacctaacagatggaagactgagataatgaacagcaggaagacagatttaaaccaaaccataccagtattatattgaatgtaaatgttttaatccagaggccagcaatttttttttctgtaaaagtccagatagtaaatattttatgcttgtgggccatatggtctctgtctcaactactctacacagtccctgtagtgtaaaaacagccatagaaaatacataaaatgatggtcatggatgtattccaatatagctttatttacaaaaataagtagctgaagagatttggccccaaggattaatgactcctgcctaagtatcccaaggacaagtaaaggacaaatggaaaactgattgaaagaaaaactacacagagtttgaaaaataatttacatttaaaaacacaatgtttcaaaataatagaataggaaaagaatgccaggaaaaatagaagcaaaataaagctcatattcttatattaagatcagacaatggagatttaaggaaagtaacattaagagagctggagagagccatttcaaaaacattaagtatcaagtgaaaaaaaaatcaatgaaaacttacatgcaactaatagcataactaacttacagacagtaaattaagttattgtggtattagatatcaattaatgagttggtaaaatgaattcaatatatggtcaagaaacataactgatcataaacaactacctcactgataatagagaagaaactctactgcagttttgtgggcaagagatttatttttaataaacagtgctgcaccaattagatatctacactcaaaaataaatgagttagctgtaagccctactccacaccatagacaaaatttaatttgaaagggatcatagacctaaacatgaaagctaaatgtaacaaaagaaaagaaatcaccctccttgaaataataataattatattggtttagccatgaagaagatattttcgaagaaagataaaatgtcctaattagccaggcatggtggcacatgcctgtattctcagctactcgggaggccaaggcaggagagtctcttgaacccgggaggcggaggttgcagtgagcccagatcgtgacattgccctctagcctgggcaacaagagtgaaactccatctcaaaacaaacaaacaaaaaacagataaaatgccccaaaataaaagatggataaaatgaatgtcattaaaattaaaaatcatttttcatctgtgagctacattaaaggaatgaaaaggaaaatcacagagccaaagaaacatatgcaatttgtgtaactgacaaaggcttatatacagaatatataaagtatagctacacatgaatgagaaaagactataatttaataatgggcaagattcttgaatggacactttacaaagaggataattaaattgcatgcaaatattgacaactgttcataagataaattcaaactaaccacacaatgagatactaacataaccatattggcaagaatttaaataagactgataatatcaagtgttgttgaaaggataaagcagtaggaattctcttacattgctggtgggagtaaaaattggtataacccactgtagcaaaatatgtgtactctatgactctgcaactctcctttgatctattagggatcaatgtgacctggaattgttataagccctggagaaggtgcttgttctatctggaggaaagtagcaccatcacattctctgtgagccatgtaccctacaaatccttgcttccttgttttatctcttgattgctttcaaactaactcatatggcgtttttaattcacttctggcaatgcacatgctttttttttttttttttaggtgtttgtaatgtgtaagagaattggacttaacagagaatctggcacataggcccactctcaaggggaggggggtacctctagggtgtcaggaggtagggtcactggggcattcctagaagagaaataaaagagaaaaagctgccattttccccaaacatgcagaattttatgcacactggcaaacaaacagaagaaaacaacagaatgagatcatctaataaatattgcaaaaatatttgatatatttcatccttataaccctctaggcttactctgatgggcatctgagagtagtgattttatatttgtcagataaattgaaaaactactgtaagatactgaaacacattgctagttggttgcccaggcacattgtattgaacagaaggagatacagctacatggactgaataagaagagagggcagactgggttcagttgacatttgtgccatctcacttctcaactcctttatgattctttgacatcataacattgtacccgtagacttcccgccctgccatgctaaatgatagttccaggactggcagcgaactttggcaggtctatacccaagagagacatactgtgggttaattcttaattgtggcatgtttgtcttgagagatgtttcagacaattttatttccacacctctcccggcttttttcatgtcccattcccactcaagcactcatgttttctttagccaacccaccctgctttgtgcttccatctgggtatagaggaatctccccttagcaaaccatatattgagttttctgtcaccctctttgggtaaatgaggactggctaatccatgcactgaagtctgagtctaagtttccaaaaagaccaagtctataagcacctggtccagatgcctgctgtttgtgaaccgcaggctctggtacttcaacccaaacactctgcagcacatgtaggggcctaagtattttgagtgtcctacatatagcctgatatttggcaaacatccaaagctatagccgtgaataaccttaattgggatgaaggttgtgagaaatgagtagaaaacagcagaatttccaattttgtttgatacaggtttgctggtattttccttgactgagataagaaaaatatacatagatctgtgtgtacacatatatatgtatgaatatattttgaatgaggttgtttaaataatatcttggtctattctgtacataaagttagactttaaacataggattgacacacattctgactcaatcataaacattttttgtcagaataataaacatgaagtatctaagaatctgatcattgactactcaacaaatatttggggccagatgcggtggcttacatctgtaatcccagcactttgggaggctgaggcaggagttcaggaattcgagaccaacctggccaacatggtgaaaccccgtctctactaaaaatacaaaaattaactgggtgtggtggctcgtgcctgtaattccagctacttgagaggctaaggcaggagtattacttgagcctgggaggtggaggctgcagtgagctgagattgtgccactgcgctccagcatgggtgacagagagagacggtctctcaaaaaaaataaataaaataaataaatttaaaaaaacttggtgcatgcctactatgtgacacatattaagtattggtagcacaaggattataagaaggaagatatccgttctcacctggcttacattgaaatatgttacatgcaatttgactctactcaatcaagttggataagtagttattgagggtgatacttaagattgtggtaagcagcgacccatatttttgggggaaaaacaacacaagttctggacagtaaagatttaagacgtgctatcatgctaagaagtatcaagaacatgagaggagcaatactataatagatacacaattaagatgcagttacattttaagataaacgttttaaaacaaaaataaacattctgacatcccaaaagtaaatcaattattttatagtcaagtaatatattcaattatgtagcacaaaatggcttcatattatctggtccaagactgtattaaggagataaataaaataattacatagagattgtgggtatattattataaatagaaaataagttcagaccatgaaaaggaaggtaccggtgatggaacgggaaaagctcaggtctgatatttcatattgtgagagctcacaatgtttctgaagagccctgtattattatggccagtaaataaaacattgagacatatttgtactcaacacatctgcctttgatctgagcagcatttctcagacacttcgagtagaataaaattcactaatgagatgatagtctaaagaagccatttaatataagttaagcatctaaactctgacgtgtatgactgcaattaatatctgaaatgcatgtcagggttatacagctctgctgcttttgcagcagaaatagcttactattcttagagacctcaaaccttcctcttctagattgcatggaaatctttcctctggcactgtgggttctcattaagacatgcaggatatagagtattccactatacctgtcttcgtgtcaacctttaaaaaagaccttaaatagtcatgcacagacacacatgcatgtagagaagggaatccagaatgataaaaaaaaaacctcaaaggcactaaatatgagaagggaagagaaaaatagtcttatttttgattgagacaagaatgattcaaggtgtctgagtgctgtcatctaacataaaaatttggaacatggattagccatattgtacttgctacctatatagtttaggtccaattattagaagtggcagaaggacagacttggctaaaatatgtattttattaaaagagctcctcaaagatagagtggggagctttagagcatagagttcttgatcattgaagagtgttgactctgtcttgccaattgcagctagagtacccacactgggctagcctaggggagccacagctgtccctgtattccgtggctgagctgctttgcagatgaaagaaaattaaggcatgtagctgtttaggaaaagaaaaactcagaaaatgaacttttataaagtttaatgtttagaaatacacgggctaaaatccattgcccatggaaattcctccactccttccctctgcacatcgtttgccaaatcttcctcataaagggattatgtttgctgtctttttcatccatgggaggctggattcatttccatgtcctcatagtctggggaaaacaaacaaacaaacaaaaaacggtgtccattaaagttggcttcttctactcaggggccagttaaagcttaggtctgcactacatctgccgttacgtgtctataacgtaacatctaaactatttttagaaattcactttgttcctagcacggcaactttttctctctcagtatcttatttttattcagcttctggttaacataaaataactcaattttattcattagatcctgagccggtgtctaatgtgaggtacaaacacaagtcagagaatgtctaggtagtaatgcaagagaggaaattaactaattagattaatgaactctaatttccctttcaaacctggattctcttaagcccaatggcccagtacatcatttgtcctcagcttcgccttgaaagcagtgaagctgagtcctatttttttttttctagttacacttcaattttttggtctcttttgctcccaatattttcacctgtgcaggtagatgtagatttggtaagagcaagtatttctaacacaatttgacattttacttaaacaatgttatgcatgtaacattatgttaggattaaaagaaaacattcactcttagagaaaaagtaggtagtaaaaattatatggccaaatacatcaaaaggtcaaataatgtaggatgacattcaaaactaatacattaagaatatcatgtaagaaaatttagtatttttgcaaatattttgtctgaaatgctataaaagtcatagagcaatatatttggaaattttgaaaaatgattgtttaatatttgcttgtattttggtgattctatctttactgctctctcatcacagtcactcattcactcccaaaatgtcactctgactacaatattgctttttcagacataataacctaccttctatctgaaaaatataacagcctctttcacattcacatgcagctcagtccctttgcaatatttaagactatttaccattatcttcttcttaaagttttttttttcccccctctggcttttgtgattctatctggttacacttttatgcctgatcaatcacttttgctacaactttcaaatctagtgtctgccaacaccattcatattttatagcattttataagcctgtatcttacctgttatcagatgttcttgattggcctgagatgcatgttctttgctttttactgctctatccacccgaattatcttatttgctagtcaaatttatttattattattactatttttgagatggagtctcactctgtcacccaagctggagtgcagtggcactatcttggctcactgcctcctctgcctcctgggttcaagcgattctcgtgcctcagcctcctgagtagctgggattacagggccacaccaccatgcccagctaatttttgtattttttgtagagatggggtttcaccgtgttgcgtaggctggtcttgaactcctggcctcaggtgatccacccccccttggcctcccacagtgctgagattacaggtatgagccaatgtgcaagcacatgatctttcacagtctgcatttcccacaaagaacaatgaccctgattcatccagtcattcagcttactcaggaaacccatcaagggcttaagaatcagaagttgtagatttaaattctagccatttcattcatacatgtgtctggattttaactacttgatcagtccctggcaggtttggtctcttaatatgtaacagaattaataataattatgctataagatatttataagaattagaaaatataatatatgaaagtgcaaagaacagtttctcagacttagtagaagcctctggatgtcctttattttgtatatataaaggaggttacctgaaaagatgattacaactgctattattattattggcattttgttccatttagttcatcttaataatagtgtaatgagtgtattccctaaggagaaaatataatttaacaatttaatcttcagttaggctattctttcaaagtagagttaaccccaaaatagcatagtttgtgaaggcatttacatgccaagcaggattaattactccatgtctccaatgatatattatccgacctttactcagatgttgattctgttctataatttgtggtttagatgatgactcacatgtgaaatttgtaacaaagaccacacagtaaactttatccataattatgtcttctctacccaacatgaattttcacctttgttgaagctttccaaactatatctcatattggcaacttaattgatcccaaaataacaaaaaatattacctagatatacagaagggtaatttatgtgttttatttgtttactttggaatttgagatattttataattcacatgaagcttgattaagttgttaaaagtgcagatgcttctaccattgctgacttccaagttacctggagaacattcgagtatctttgttcttttctcaatggccaccagccatgttacacaatataaatgtgtgaataggagttaaaaatatggatatctacctttaatctccaatgttggaggtgaggtaaaggggaagataaaatactagacagccaatggttcttacaggggcttaggtgagtaatatggtcctaggaaggtttgggtaggaaggatagaagaaacacagactatgaggcaaaacctagaaagaaaataggctgtgactagaaaaaaatgaagaaggagaatcttgccattcactagctattcacaagtctcctagcctttagctcagccacgactagttctattggaataatagccccttgcaaaaatctctgtatttttgaagattatccatcttttctataacctttcagtgcctctgcagagaaatccaactctctcttatattgtttactatacatgtgcttccatcagtagtcataaaattatgtttaagatttgttatcaaagccttaaagctatttgaggggatctcaacaatttgaataatattcttaatgactaaaataaaaaattccaaagccctatttacaagccaacacctgctctctatagtatttctatacagtaaaagtcattaaattcaaaaagataggcacattaaacttaataagagataaatcttagtctctgggtgaatctttgacttaaactttagcagcattcttaccaattgatgatattaagtgctttgtaagtttaaatgattttaatccggaaatcattgtgttgctttctttgctttctctatgtctgctacacagaaatatctggtctgctgtaattcactctggagtaatgccactgcgacctgctgataatggctggttgcacaacagttgatccagaaggaccttggccaggatgatttggcagtggagccaaaaggagtgccacaaatattgttgcagaagtgataccagatttggaataaaatattccccccccacaaatgtttctcagatgatgttgtatcatcttattttatcagactcatctctgttgtatcagactcattgtatcaacacaattgtagattcactctcaacattcatttcaggcaaactagttttcttagagtgtctccagagttaacaaagattgtaaagcaatggaagccaatcaagtcacaataaagaaccccattctgatctgtttgtttatgtattaaagagaatagcatcctcagaatcatttttcatttgtgtatagccatacaatctaagaatcaataaaaatttttgcacatatatgcaaatataaacttaattcatgttggtaattttaaatattgaaatagtagccttgtatactattttttaggcgtggtcttgtggtttttggttgttagtgttgttttctcatttgaatgcagactttttgtggttgtattccccaatttattcttttctcacttaatggtaagaagtggggttttgtggtgattataattttttaactattaatacaagtctatataaaataactggaagagcacatgaataagtgaccaaggaatagtcaagtatggtagatacattattttctctaattagtatttgttttaaaatcaagagttttctgaaagttgtttttgtgttttgaataaaataatagaataacatttgagctctatttctctgctctgaagcctgtaagagccatttacttcatgactgagtttttcactacataggtatatctcagtatttctattaaaaaggaccgtagtacaggtaatataatgtcatgactcaagaaatctggtatttcatttctcaaagtattccaaaaaagatagctagttggataagtgacagacagattgatacatagatacaaagataaatagataagtcgattgaataaaacaaaggaacattttaaagagtttatttgagcaaacagaatttcatgagttggtaaacaccaaccaaaaggggttttggattctgatgaggaagctcattggacaggcttttataaagtgagtgtttttgattagttgagctttgcagttcaagtaagattaaggttaatttcaagacctaattggctttgtctgctcaaggatttttcaggcctggtctccatttcaatttaccttgagagaaagatagagacagagaaagaaagagatagagagagaatatgtgcatacataatatacatgaatattatataaatctgtgtaacataggagagaggtcagcaaatttaatctacaaagttaaagaaagtaaacatttaggctttgcataccaaatggtctttgtcatctctactcaaccctgccaaagtagcacaaaagcagccagggacaatatgtaaatgaatgtacattgccaacctgtaatatagaatataggcttcacatataaaatgtaatgaatctttaattatgtaaatgtgataaaatatatgtcacttaaatcatatttataaatgaatgtgcatgcattttactaaaataatataataaggttatataaatgaataccaatatgagttggtattttcagtcaagcaaatttaaatcttgcattgattcatcagatttttttttacttctaaaattctgtgttatttattcatatataacactatgtggttaacattagtggatatgtaggatatcgtaatcttattctagcagggcacagtcctgctaaagatgaattcagtttacattgtttaaatactacacatctgaatcttcaaaactaaaattctgtgagaacagggatttcaattttcttttgacatcacaatagaaacaacaaaataatgactttatgcatagagttgaataaatttaccaagtagaaccgttttcttctctaaccaagcaccagttggtcaacatctcagatcctgcaaccttggactggctggtctgcaatggtgttttgggttgttttgtttatttatttatttttctgttttccttttgtgtaagataaagcactgcactatacacagatataaaggtaatatcacataaaatatctaccagctttagtagctggggggaattattacctctatgtccaaaacaaggatgagcacaggacagaggcaatgaaaaacaaaccagaaataggtgtgttagggcttttaatcaggtttaacgagaggtcataatttatccaattatgaaggtttgtattttatttgcttgctgagatgtttaaaattcttagaatctgataggaacaatagagactggggactgctttagaggggagggtaggaagggggcatgggttggaaggctatatatggagtactatgctcattatctgggtaagcattgtacctcaagcctcaacaaaacacaatttatggccgggcgtggtggctcatgcctgtaatcccagcacattgggaggccgagccgagcagatcacctgagatcaggagttggagaccagcgtggccaacatggtgaaaccccgtctctactaaaaatacaaaaattagcagggcgtggtggcgtgcgcctgtaattccagctactcgggaggctgaggcaagagaatcgcttgaacctgggaggcggagcttgcagtgagcggagattgcaatgcaccattgcactccagcctgaggggcaagagtgagactttgtctcaaaaaagaaaaaaaaaaaatttactcacataacaaacctgcatatgtatccctggaatctaaaataaaaatagaaaagaaagaggacattaaaaaataaaatatatttaaatgtttgaatttgcctatataacttctgtttacaaaatattaatgtgctacattaataaattatattttagtggtataaacagtctgttagtggaaatcttggttgtataacatttaaataaggttattttaatgaagtccaaagataagtaaatttaaaaatgtccaaatttctttttcattctaatgagctgtctggaatctgtcaacattctgaactgtaaatgtatgtagaagttcaatactgaaaaaagagcttaaagcataaatctataatttataaaatgtatggaggagaaaacctccctttaaaaaaaatgaatgattctctctaatcattaatgacatggcagcattgccaatgcaagaattatattttctgttttctatttaatttaactaattcttctaacatttggaaactactgtggtatttaatataaatataatattcaaaacacttttttaaagtttcaaaaataagaattatcatctgtcaggtatagcctacaattcaactgaacgctttttactttgctggcaatgatgagttcccttgtgttagcttatgaaagaaaaagtagcttttattggaactttctcgatattctcttcttgaccactaaatttttttttttaatttgcctctaaaagttagctactagaaagggccaagtgccttttgacaaattaagaatataggaagatattaaatcttaatcctgtaaaaaaatgatgcagttagaagatgaatttttcattttttaaacaactatgcaaacttgacttattactcatagtgctagacctaatatttttcataattacaatggagaagaataacatctaccatggggtattataaattttaaataaaacttaaattctgaaagaactttgaagtttaaaaatgttacagcgatgtaatattacattctgtgccctcatcaaagataaacatttaaaattacaaataattgaaaatgtcacccaggcatattttcataaaataaagtttcatttctcacttaactacaaaaatcttctcttaaaagaagttcttacaaaagatgttgctatatatgagagcccactgaattaattagtgaagttttgacttatagttttgaaatgtgtctgctatatttcccagggtatgataatagtaataattgtctggatcatgaatattaatatatacagaatttattttaaaataatttaaacttaaatgtcaattgtgtgttagaaaaatggattattccttagcacttctttcttaaattacattatttaagtttgttaaaactatattatctgattaaacaggtgacggaatcgaccttaggagagtaaatagtagagtgatgtgtatattttctttctttcatatgcccataaatctcagtaaatccaaaagctcttgaataaatgatcacaaaataataccaagatgatgtataatgcagttcttgatgtattttacattttaagaagacaatctatggttcatatcttagctttatatacattccaggcagtttatataagatgctgaatattctcattttatttttcttgtctctccacttaatccattacagaaaacatgcactggcatctttggaggtgtgtgatcgttaggagtaatctaaggactaacactaacatctgtcagcttttctgctgtctgtagcctgaaagcaacaacacatgccctggtgtcccagagggtctccaaaacaggcttgagtgtcttatgaacagttggtgcttcattttgagtttactttccaagttcagaatctttattagaaaaagaaaaaaaaaaagaggcctaagctaacagatgttcaattaagtggaaaaaaaatagataacagatatacccatgaatcccaaaggatatttatcagaaaacaaactaaatatttttgtctctatattattcctttttaatgtaatattccagtcaaatattaatgttttagtcaaaattgcacagaaaactctttttgccatgataaaatgtaataatctaaagatgttaaattttaaataagttttggagaatataattacaagaagtcacatattttatgcttaatttactacagaaaagttgctgcatatgtttaatttctctgacatttatgtaacgttttattagtctaccaataatggtcagaaattgttattatatttatcctctcttctccaaagtgctcataaaaaaaatcatgttttcatgaagcttcccaaaaaacacttcctcttttgcaattccacagcactacttccaaggttgtgttcgaaattgacaccctgtctctccacccaaatattctcttttcaggtaatttgtgaggtgccctacattatatttccttttgaagattgacaataaagtttgagtcattaaactctgaaatgaaattcagaaaaaaaattgtgttttaaaaagtttttaaattttattttatcttaatgtagtttattttagtttagagtttagttcagttttttgagacaggttctcactctattgcccaggctagagtgcagtggcgccatctccgctcactggagcctccacctcccaggcccaagtgatcctcccacctcagcctttcaagtagctgggactacaggcacatgccaccatgcccagataatttttgtatttttgcagagacggggttttgccatgttgcccaggcctgtctccaactcctgggctcaagtgatccacctgccttggcctaccaaagtgctgggattacaagcgtgagccatcaggcatgagccaccaagagtaagccaccaggtggcctggcccgtttttaaaatgttactgttttcagtacagtgaatatttttgtttaactttagaaatatgtatatgttatccaccaaaccacgctgtgaatttcctttggttattttattgtttcttagaagcataataagtgttcaataagtatgctgatctggtttgatccagtgaaattacttttatcaaaatatgagctgtaaaaaaggtgtagataatttttactaaaaacactgaagaggctacaagtaagaaaacagtcaaggctcaacaacttaaaaatttatgatattattttcaatataatgaagttacaatgattgatgtatctaacaccaccaatcttaaaaaataaagcattaaaaaatatgcttccttttataatgggattttctccagaaggtatcactatcctagatttttattaatgattctcatgtattaatttaaattctaatttcatatttatatatctatcaacaaactgtagggtctcactagatgttttaacaccatatgtatatatatatatatatgtgtgtgtatatatatatatataaatgctactatcctgttattatggttaggttttgtgtccccacccaaatctcgtcttgaatagtaatctccataatccccataacccctaccttcaagggagagaccaggtggaggtgatagaatcgtggctgcggtctcccccatgctgatcttgtgataatgagtgagttatcagggaatttgatggttttacaaggagatcttcatccttcacttggcacttctcctttctgccttcttgtgaagcaggtgcattgcttccccttggccttctgccatgattatcagtttcctgaggcctccccagccacgctgaactgtgggtcaattaaacctctttcctttataaattatccagtctcaggcagttctttctttttctttctttctttcttctttctttctttctttctttctttctttctttcttctttctttctttctttctttctttccttctttctttctttccttctttctttccttccttccttccttccttccttccttctttccttctttctttctctcttcctttctttctttctttatagcaatatgcaaatcaggtaacatacctgttctcaataatactgtgcacattgtgtcctcagtttccacaatgtacacattcaatcttttgctattagatatttaaattacttctaatttttggctattacaagcattacatctgataatactcctgaactggtatccatgagcatgcatgaacctttcactagagtatatatttggtagcagaattgctatatcatattttaggcatgtcttcataattgaatgagtgttgcaaaataatatcaatacatattaataacaagaataaataagacattctaatattctcaatctttatgctatttgatattgtcagattctaaaatctttgctcatctgaagtttgtaaaatgatatccatttgtagttttattttgcattttcctatttggcagttgatcattattttatatattcatttgtaactaagtttcctattttgttaattgtcttttcaaaactatttcctctgttggagaggaactccacaggagggatttgagaatttttgtctttgtctagttgatctataagagggtgtgtatttgtgtgtgtgcatcatggggttttttattacttcaaatagcaaaaatgtggttttctttaatagtagggaattgatattgcttttatagaaattatgagatagctttattttttcctagataattgtctaagcaatattgatggataaatctttacccttatgtttgtcataaattgatgttttgtaaataattacaattctgtttctcagctgctttgttccaatattctatttttcattctgtacctatactacatggcttaacttaattaactaagatttatagaggtatctggtacaccattatccctgacctcttgttatttttcttcctcctctcctctgctctctttcctgctttcattaatgctcatttgtgcatcctgcatgctccacaatatacatgttcagtctcttccttttggacatttgagttgttctgaatttttggctatgacaaacagtgaatattaaaatattcttagacatgtctctaagacacgttgttgctgtcctgatgttcttcaccttgtcaattcttcctcttcttctcactcattcttctcctctttcttccaaagctctttctactacttctttctctttccatttcaaaagtttgctaaatattttgtggcaaataacattttacaattaaaaaataatcaatgcagtcaaatttcatacacagccctaatgcatttgtgaataatattctattaacttatggttagttttggaagaaatattatattgagccctctatgaatgaatccagtgaacattttcgtatattttgatatttaattttatttaagtctgtgtctttttacttaattttattttttcttcagtaggtcttgtacatattttttatcttctggaatttggtcaacattagtaaagaatttattcatttaagaagactgggaattaatagtactagaaccatacatgtatatagtttagacagcaatttttaattgtgacattgaaattatcactttacatcatcatcatagttttgtccacgtgatctagaaactacctaaggagattgcttaaaactactagagtgattttggataattcaatctgtacttcacatttgagttatatgttttatgtaattggagctatacaaatttattatttacatttagaattttttaattttttaattgataaattaggccttgtagtgtgcaacctctttatatctactgatatatttggccttagcatcaatttttctggtattaatttgaatcagcttacctgtgttaatgtttgcatgatgtaaattaatttttaacttatttaaaaactccgggttttacattttaggcacttcttttgtaaattacataatcatgacttttaaaaatgcaaacaaaaagtatttttaattaattgacaagttttattcttgtgcatttttgtgatggctggcatgtttaaattctgttttttcatattatttgcacaatatttatgtatttatcactcttttttctaaatgtattttaaatttataattcatttttaataatatagattctcagaatgtttttgtgcaaaagacaaaagggaaagacctttattgttgcacttcaaaataatccaaacttggattatattttgttcatttcagaatataaatataaatttaaagttaaaactcttcctctttaattatgcctagaaaaataatagtgtttattgaccattcctgaacacctcctttctccagtttttattcctctaacagtatttgtttacatcttgctggaagcaatatggctgaacatatcttgcctttcagtaaatagaatttaatttgtgggtatgtgatttagaactagaataaaaggtacatacaatgtttaattaagtacattttagaagagataaactaatgtaggttaaactaactacaatagaaacatagaagttaatcttatccatattttcacattctagaaagttatgcatctttttttctcaattaaaaagattatcatgggttaaaaatttgtcataaaattctttaaagggtaggataaaaatgaaaaaaactctcactggaaatctgtatttgcataattactgtaaaataccaattttacacacaaacaaacagaagccaaaaatgcttcgaaatctcatttgaataatgcatgcatatgtattggttctgcatggctaagccaacagttgcatcagtgaaaatatttaccttttaatgtcaacactagaaataacaattatcaatatgaaagagaaggccctagtataaaatacatactatcatcaaacaaatctaatttcttattttgttatgaagtaaaataatacatttgttatgcatttctaaagcaaaaaattacataagtatcaggggtctattaatttttaaaagtacacataatgcctaattttttacattgaagttaggtaaagacatgtatagttaatgaattaaatgattttagtaagatataatattcatggaacaaaatgcataggttataatttttcattttgataagtttgttaattgtagaaaaccatgtcactaccaccttaaacaagatttagaataattctgtaaactttctcttcaattacccagcagtaaataatctgtcagcatagattcattttggtttttcttggaatttagataaatgaaattatacaatgtgtattttttagagtatcacaccttttcactcatagatgcaaaaacatgtattggtagttttctccaattgtacagataataaaatttattgaataaataaatcaacatttatttattctgcatttaatatacttgtgggctgtttgttgctttgggcttagattatctcttttaacctttgtatatctttcaactttccttatgataagtatagacaagaggcctatgatgggtaagttatttttcgtgttataatttataatacttttcaaatatcacctggcttaattcatgccacaggcccttttccatcactcagatgaatttttaaatcttatattcattatgtattttgctattttgtttaccacattgattttcatgcacttgcttagtacactttcattcaccatcacataagtttcaacatgttcttagcttcattaatttctcaatcccaggttactacatgctatggtttgaatgttgtccccttctgaactcttgttgaaatttaattgccattgtaacagtattaagaggtaggacctttaaggcgtgattaggccatgaagacttcacatttttgggtggaattggtgctgttataaaagggtgacttcagttcatccccctcttgctctcgttctttctatcttactatgtctttacccttctcctatgggatgatgcagcaaaaggccttgccagatgacgaccccttgatttgaacttcacacttccagaactataagccgataaagttctattcttaataataagtcagtctgtggtattccattataggaagacaaaacagactaagataatgaattggtactgagaagtggggctgttggtataacaaatacctaaaaatgtgaaagcaactttgaaatggatagtgggtggaggttgaaagaatttggaggagtaggctagaaaaagcctatacagccctaaacagagcattaagggcaattccggtgagggttcagaagagaactttagggtaagtggaacttcttaaggattacttaagttgttgtgatcagaatgttggaagaactataggcagtcaaggcaattctgatgaggtctcagatagaaataaaaacaagatattggaaactggagtaaagaccattcttgttatacagtggcgaagaacttggctgaattgtgtccatgccagagggctttctggaaggcagaatttaagtgcaatgaattaagatgtctgctggaagaaatatctgagcagaaaagcattcaggatgatgtgtggctacttttaactgcatatagaaaatgggaaaataaatacttacaaggagaacagaatttagggaattgaaatattctgagcctggtggtgtggtcgaaaataaaagaccattttcaggcgaggaatccaaggttgcggccaagtgacctatttgataaggagattagtaggaatagaacaaagcccaaagctattcatcaggacaatgggaaaatggccataaaggcactgtggagcttacaagtgtgaccgctcccatcacaggcccagagtgtcaaggcctgactgaaggaaatatgtcaaaggagaggtttcagtgctctcaggaacttggaacttactgtccagggccaactcaagtctcagttccctacattctagtgcagggctcgtcagctgccccagccacatctcaggactgccaggatcagctacacgcagctgagaatcaatcccacccacttctccagaaggtatgagcagcaaatcttggtggcacctaagtggtgttgtctgcaggcatgcaaaataaacaagctgtgaggggcatggtttccttcacctgaatttgaaagcatgttgctaacagcctggtgtcccgggaaaagacttgttataagggcagagccactgcaaaaagctcccattggagaaatacctagcaaaattttggggttggatctgtacagcgaatccccagtgggctgaggaaagctgttggaatggggcttcctttgagaccccagaaatggagagtcaccagtgttcaattccagcctgagagagctacaggcacctgctctcagtgtatgagaggtgcaggcatgagctctgcctggcaaaactatagtgatggggcttccttaaatcttgtggcccccaattctgtgccactgtgttcagagggtgggacacggagtcaaagaagattgtcctccagccttaagatttaatcttgttctccctgttgggctttgtaattacttggaacaagttattgggtttttttcttgtccattttctccttttggaatagtaatgtctatcttatatctgttttcctattctattttggaaatatataatttgtttgatttcacaagctcacagtcggagagaaatctgcctcaaggtgaattgtgccttgcgtttcacctgaatccagtttagatgaaactctggactttggatattttagttgatactggattcggttaagaatttagagattggcggggcatggtggctcacacctgtaatcccagcaatttgggaggccaaggccgatggatcacctgaggttgggagttcaagaccagcttgacctacatggagaaatcccatctctactaaaaacacaaaattagccgggtgtggtggcagtcgcctgtaaccccagctactcatgaggctgaggcaggagaatcgcatgaatccggaaggtggagtttgcagtgagccgagatcacaccattgcactccagcctggacaataagagcgaaactccgtcaaaaaaaaaacaggaagaagaagatgaagaagaagaagaagaggaagaagaggaggaggaggagggggaggagcaggaggaggaggaggaagaggaagaagaagaaaaaggggaagaagaaaaagaagaagaaggagaagacgaaaaaaagaagaggaagaagaaaagaaggagaagaagaagaggaggaagaagaagaagaaaaagaggaagaagaagaagaaggagaagaagaagaatttagaagttattggatagaataaatgtagtctttatgctaatactgcatgagttttaggggtcagaggcagaaagctatgatttcaatgttgtccccttcaaaactaatcttgaagtttgtcattgtagcagttttaagaagtgggacctttaagacacgattaggccataagggctccaacttacgggtggcattgctgctgtcatataaggacaagtctgtccctctgttgtccttccacattccaccactacatactacagcaagaaggccattagacaatgtcagctcctcagttttggaattttcaacctccagaattatgagctaataaacttactatcattcaaaaattacatagtctgtggtattttattatagcagcacaaaatggactctgacactacactattgtcatagagtcatgataaacgccgtttttgtgcaagctgcataacatggagaggtaagacaattagctcagtctccattgattgaattaataaagaacttttttcttcaaataatgtacattattagacaggttaaggatgtggttaaatttatggtgacctccatggatcaagagatatatttttcctatctgaaaggagaagtcatccaaaaggaaatgatcggaaatgagtatacctgtcctttgcctgagctactagtacagcactgctgatgttatactattcagagtgtattaggaatatattacttcccctttcagaacacaataatatgcgtgtgtaaatcagccttggccctgccactggctgagatactctgcttgctaaatcttagtgaagttgctgaactcatttcccattgtatttctcaaattttctttaagcagatgttattaatggaattacataattccttgccaagagtcaattcttcagaatgttgaattagtgctgttatgtggtgcctcattcagtgagaattaatacaaatcaaagagatccttgaaactctgcaagatagattttgtggatcaattagcttgactgataatcagtaagtctaaacactaatcaacatttggaattgtcttcttgacagaaataatggaaagcaatagtctgtgttcactggaatggaggaaagctgatgcacataaataggtagtgtcatgtatatgtgagtgggaggaggttgagggagagaagtttggttatagagattcattccttgtctgagcatgtctgctgctgccaaaggaacatcatgagtagtgggaagacagcttagctaaagaataggatgcgtgcagattttaaatattctggggctgggcgcggtggctcacgcctgtaatcccagcactttgggaggcggaggcaggtggatcacgaggtcaggagatcgagaccatcctggctaacacggtgaatccccgtctctactaaaaatacaaaaaaatagccgggcgaggtggcaggcgcctgtagtcccagctactcgggaggttgaggcaggagaatggcgtgaacctgggaggcggagcttgcagtgagccgagatcgcgccactgcactccagcctgggcgacagagcaagactccgtctcaaaaaaaaaaataaataaataaaaataaataaataagtgaataaatatttttggctctacaggtttcttatatctgtgtattcctacaacttctctgcatgggtattccttctccacttatctacgtatgtgtaaattgttgctgtttaaaatatgtcactgtggagcagtgtttacccactagtacactttattaataactttaaattggggaggaccaataaaaagttagtaacagcattctatttgtacatataaattttaaccagaaacattctaaattgataaaattcctgaataaatagttgaattgaatcacatatttttcaaaaaaaaacacaatttgcttaatttaacctgttcttaacagtactggcataaatcttactctaatgaatgattgctttgtaataaaaacagaatattataatactaataatgtatttatgccttaatatgtatttgtttgttaagttctaaagttcttacctgtttttcaccttttccgttatttattacttaattccttcctctgttttttatttcctctcttcttttcttctttcttcccgtcttacttctccttccctccctctctccactcgctcctttcttcatttattctttttctttgttgcttttatttgacaattcatgagtctcattctcttctcattcaataggcagaattttaatgtgtttgatagaatatttaattcatatatttatttttgaatcaaatatacagctcttttatttctatgaatgatagtatgcaatagttttaattttatatttcacagcttttactcagtatccttgcaaaaatcaatccacgttgctggatgtgcactgctactacactgttagtagcaattctgggattatgccataatgtgcatcaaccatattgtatatattcagttcacagtaatggaagcatagatcgcatttagtacttaataatttcatatgctttcactctgaatgtatgtaaagttttctctgaacacataaaaagatgtttaacctccctaatcatctgggaaatgcaaatcaaaaacaccatgagatttacctcatatccactagaatgctactattaaaaacaaacaaacaaacaaacaaacaaacaaaaaacctctaaccaaaaccccgaaataagtattggtaaggatgtggaaaatttagaacccttgctcattgttggtagatataaaaaatagggcagccactatgaaaaacaatatggtggctcctcaaaaacctaaatgtagaattatcttatggttcaccaattccacttctgaaataaaacccaaagaattgaaagcagggactcaaatgggtatttgtacatccacattaatgtagcattattaataatagccaaaatgtagaagcaacccaccaattgttaattgacagatgaatgcatgcacaaaatatggtataacacttacaatgggatattaaaaggaaggaaatctgacatatacaaaatggatgaaccttaaggatagtgtgctcagtgaggtaagccagtcacaaaaaagacaattactcatacaatgttccttgagtcatcaaattcagagaaacagagagtagaatggtggttgccaggtgcccgaagggtaaaaataatggaaaggtttttatttgttttttttttttccaaatcattattattatttaacttttattttaaaattaggagtacacatccaggatgtgcaggtttgttacacaggtaaacttgtgtcatgggggtttgttatacagattatttcatcactcaggtgttaagcctagtatctattagttatttttcctgatcctctttctcctcccactccccacactcctataggccccagtgtgccttgttctcctctatgtgtccatgtgttctcatcatttagctcccacttataagtgagaacatacagtatttggttttttgttcctatgttagtttgctaaggataatgacctctggctccatctatgtccctgcaaaggatatgatcttgtccttttttatggctgcacagtattccatggtgtatatgtaccacatgttccttatcaagtgtatcacttatgggcatttgggctgattccatgtctttgctattgtgaatagttgtgcaaagaatatatgcgtgcatgtgtctaaaatgttaatagaataatttatattccttcgggtatatacctagtaatgggattgctggttcaaatgatatttctgactttaggtctttgaggaatcaccacactgtctcccacaatggttgaactaatttacactcccaccaacagtgtaaaagtgttccattttctccaaaaccataccagcatttgttattttttaacttaatagtagccattctgactggtgagagatggtatctcgttgtgcttttgattgtcatttctctaatgatcagtgatattgtactttctttcatatgtttgttggctgcatatatgtattcttttgagaagtgtctgttcatgtcctttgtcaattttttttttttttttttttttttttttgaggcagagtcttgctctgtcacccaggctgcagtgcattggaggaatctcgagaggcacactgcaagctccgcctcccatgttcacgccattctcctgcctcagccccccgagtagctggcactacaggctcccaccaccacgccaggctaattttttgtatttttagtagagacggggtttcaccgtgttagctaggatggtcttgatctcctgacctcgtgatctgcccgcctcagcctcccaaagtgctgggattacaggtgtgagccactgcacctgtcccctttgcccatttttaatgtttttttttttcctcttgtaaatttaagttccttacagatgctgggtattagacctttgtcagatggatagattgcaaaaattttctcccattctgtaagttgtctgtttatgctgttgatagttaattttgctgtgcagaagctctttagtttaattagatcccatttctcaattcttgcttttgttgcaattatttctggcatcttcatcatgaaatctttgcccgtgcctatgtagtgaatgatgttgcctaggttatcttccaagatgtttatagttttgcattttacatttaagcttttaatccatcttgggttgatttttgtatatggtgtaagaatggggtccagtttcaattttctgcatatggctagcctgttctaccagcaccatttattgaacagggaatcctttccacattggttgcttttatcaggattgtcaaagatcagatatttgtaggtgtgtggtcttatttctgagttctctgttcttttctactggtttatgtgtctgttcttataccagtaccatgctattttgtttattgtagccctataatatagtttgaaatcaggtaggtgatgcctccagctttgttttttatgcttaggattttcttgactattcaggctcttttttggttccatatgaattttaaagtagtttttttctatttctgtgaagaatgtcagtggcagtttaatgagaatagcattgaatctataaattgctttgggcagtatggccattttaataatattgattctttctatccataattgtagaatgtttttccatttgtttatgtcatctctgttttcttggagcagtggtttgccattctccttgtagagatctttcacattccttgttagctgtattcctaggtatttttttgtgtgtgtggtgattatgaatgggagttcatttgtgatttggctttcagcttgactgttgttgctgtgtaggcatgcctgcaatttttgatttttgcatcctgaaactttgctgaagttgcttatcagtttaagaagcttctgggctaagacaacggggttttccagatacaggatcatgccatcttcaaatagggatattttgacatcttctcttcctattttaatgccctttatttctcttgcctgaatgctctggccagaaattctaatactatgttgaataggagtagtgagagagtgaatctttgtctcgtgctggttttcaaggtgaataattccagcttttgcccattgaatatgatattgactgtgggtttgtcatatatggctcttactattttgaggtatgttccttcaatacctagtttattgagagtgtttaacatgaaggtatgttaaattttatcaaaagctttttctgggtctatttagataattatgtattttttgtctttagttttgtttatgtgatgaatctcatttattgatttgtatatgttgaaccaacctgcaacacaggattaaagcctccttgactgggtggataagctttttgatgtgctgccagatttgatttgccagtattttgttcaggatttttgcatccacgttcaagttttctgtttttgttgtatctctcccaggttttggtatcaggctgatgctggcctcattgaatgagatcccagagccggagtatgtgaagctcctgtgtctctgtgtttgcctgagtagctgctcggccaaaacttcagtcagctctgtgtgtcagactgaaggccctggtggagtgggctcatgaggggatctcctaacccgagagttgcaaagatctgtgggagaagcattgtttcccggggtcacacattaactcactgcctccttgtgaagacggagtttctcttggctctctgctgctcccaggttggggcatcaccctgccctgcttttctccattctccatgggtcaaactgtccccctgatcagtcccaatgtgagtacttggatgttttagttgaaagtgctctatttactcatgtcttttgttcctctccatgagcccatgcaccctagctgcttcttgtgggccaccttgaccccacacccaagttatgttttaatgggtgtagagttccggcttttcaaaatgaagagctctggagattcattgcaaaacaatgtaaatgtacttaaaactacatatttgtacatttgaaggatggttctaatggtaactcataaatgtatttactccagttaaatgtaaaaattaaaattaaaataaaaaaagatttatctgacagtgggagtgacctttctgggtcacaatgtgtttaattcaagcaagtatgagtacaatattctatttgaaacttttacattcaaagccttgtggtcttcaaatagttttgtctccacttcccacacacagatcattcacaccctttctatgggacacaaagtctggaatattctttatgtattgtcttcaaaatatttgtcttttaaggcttctgatctataaactaagtgcaacctgcttctgccatcattatcatagctagttgtgccacacttaaggaagcttattcttaatcattactctccttggccctatttagagctatatgacttctgaaaactgtctccagctttgagaattttaagggtccagaaaattcaaagactatttagtccaaatttttggtggtaggagttcctcaaaaccaacaatgtttgcaaagaaaaatcatttgtttgctgccagtttcgtctgccagaaaacacactgaatattttttaatgaacatttttcacaaagctcctttttattaagtgcttccttgatcctatttttctctctctctctctctctttctctctatctctgtctctctccttaaaacaaagaagcttccttgagaaccttggaattaaataggaaagctgcacctttaaacttatatttgctctaagtttatttaactacacatatggattgaaccattatcgttcaaagtcttttatgaatctcataattttgtctttggagcctaatcaatcatctttcccaatcttgaaaaaccttggattataggacactattttcttttttttctactgtaaaacatgcaattcttttttgagattgtatctttcttataatgccctctctaacacagatagtagtggctaacattctaatatttcattttacactttctttagacctaggggctgagaagacatgttgtctgccttctaatttaccaatagtttaccaaaacatttatcttattaggaaaagtgcatttaccaaacgaacatacagatacagatatgtactgttaatttctgccatgatttttgcccataaacttttgttagaagttgttctacataatgttctcatatatacattgtcagaccttgctattctattctatttgcaattcctcttcaaggtcatactatcttgttttcattactatatctttctgaaagtgcacattatcctgatgttgctctacattttcaaaatttgctactcattgacagctattattaattttatttttattttattgattgtatgatacaatacctataaaataacatgcatatcacaagtatatattgtacacattattttatcatgcctgtgttattatatatcatgcatatataaagcatgataataaaatcaaatctaccctgccacttttatatcactgatatggtttggctgtttccccatccaaatctcatcttgaaatttagctcccataaatcacatgtgttgtgaagggaaactaatgggagataattgaatcataagggcagtttcccccatactgttcttgtggtagtaagtctcacgagatctgatggttttataaggggtttcccctgttgcttagctgccattgtttctcttgcccatcgccatttaagatgtgcctttcatcttccaccatgattgtgaagcctccccaaccacacagaactgtgagtccattaaaccttttttttttttttaataaattaccaagtcttgggtatgtcttcatcagcagtgtgaaaattgactaatacaatcagatgtggccatatgatttactttggtattagaatataagtggcatataagtactacatctcagtacaaactttaaaagccttcatgtggttcaaccaataatttatatcactctgccctgagtttcctgtgtttcctataggagcatgggaacttacagtctgggtactggaataaagattcatgtagcagcaccatggccaaattacacctgatacaatattttagtgagaaataaatcccatcactgcaggtatatatgtgtgtgtgtgtgtatgtgtgtgtgtgtgtatatatatatatatatatatatatatatatatatatatctccacttccttgatatctggcattacaaggtgctctgggcctatcttccacatttcatgcttcagttctagaattatcctttctccaaggagtcctggttcattttattgcagaatacttttagaagcaatatctggatactggatatgcttcttgctactgcagaactgttgcttctggtctctttcagttggtagaacaaaggaatatatacatgtattctaacttatatgtgtatacatatctataaatatgtctatatgtaaacatctgtatataataagctaaaacaagatcatactaatctctccaatgctaatctattcccacatgaatcatttaagccttcttcccttgctctaaaatacagggtgtgtgtatttttcagttggacttcagttttacagacttcattaattttcagtactttaggtcggcaccatttccccgatgaccttcagtgacattgttttatatacttgtagtacagttagaatgttttgtcacattctgtattctacaccagaattccctagaccacttaaatgatgtgcttaaattttcatacattaaggttcttttttgtgtgtgctgtaaagttcaatgggttttgacaaatgtatgataacatgtatccacagttacagtattatccagataaacttcactatcacaaaaaacatcctctgtgctttatctatttaaccctaccctgtcctagttactatgttgtgtttaccctttgcatatctttactttccacagtatcataaaattagaattttactgtatgtcaatttttcagacgaactttgttcatttagcaatatatatatattagatgcaactatgtctttttgtggtttcatagctcattattaaaaaaaataatattctattttataaatgtatgccaatgtgtttatgcatgcacatgttaaagaaaatattggttgctttacattttgatgattgtataataaataaagttgctataaatatttgtgcgcatgtttttctgtggttatattttccaattagtttgtgatatggtttggctgtctccacctaaatctcatcttgaattgtgattcccatgatccccacatgtcatgggagggaatgggtgggaggtcatttaatcatggggacagtttcccccatagtgttctcgtgatagtgagtgagttctcatgagatctgatgattttatgcctggcatttgccctgctggcatgcattgtctctcctgctgcttgtgaagaggtgccttccaccatgattgtaagtttcctgaggactccgcagccatgtggaaccatgagtgaattaaacctcttttctttataaattacccagtgtcaggggtttcttcatggcaacatgagaagggactaatacagtttgctaaatatttatgagcatgactgagcaatctatgctaagaccattcttatcttttcaagaaactatccaatagtttttcaaaattactgtggtagactaaatgatggccgttaaaatagatgcaggtcctaatccctgaaactgtgactgtttctttagatggcaaaagatcctttgcaaatggaacgaagtttagcatcttgagataaggggattgtcttgaattatccagtggggccctaaatgcattcaaaagtatgtttggtacagagaggcagagagaactggatgccatagcagaatgcagtggggccactgaaacaagatgctacactgctgcttttgaagatggaagactaagccaggagccaaggaatgcaatgaataaataaagaggtaaataaataaataaaaatctgcattcatatgactccccaaattttaggataatagtttgttctgtgacctcaattctgggattttcacaagagagtccatcgattttcacttggttcagaatttttttttctgtgagagtaagaagtgatgatttcaattttttgtatatgaagctaaaattgaaaattttaattagcaacttaaaatactttcaaaaacaactataaatttgctgtcttaaaaaaggcttaaatctcagtaataacctataattaaccctagattgcctctactttgttttccaggtgccaccatttgtccaaattatataaatctcattctaaattctgtgtttatcatggcaaacctatctaaaattatttctaaaataccatttggggtgattttatctttatgaaatatggattatactgtatctaatatttaagtatctactttttgtctcaacagtctactactaagatacatttgttatatattcattttcaacttctatacaatactttgtatgtcactttaccacacttttatcattctctcttccattaataaatatttgggtggttttcaacttgttttcatggatactatgattaactttgtcatacatgtctcctattgtgtatatcaagtatttttctcctttcttttcttcttctaactaaaggcctgggattaatagaaaggaatgcctgagttaaaatagggggttgaggagaccagagattgatcatgcagatgaagcttccagggaataggcttcaaagagaatagattgtaaatgtttcttattagacttacaaagtctgttctatcagtctaaaggtctgtttttatcttaagagtaatgacacatgtttaactccccttcccatcgtggactgaactagtttttcaggttaactttggaattccctaggcctaggagaggggtctattcagatggtttggggccttagaattttatttttggcttatagctatccctgtgccagtatcttcaaatccatagagcttcagaatgacgtttatcatagttcaaatactccttctctggtctcttgttcagaaaattacaggccaaacttggccctttattcttcttgaaaattttgtaatgaccttattaagttgtacagaataaaatgtcaggagttggattttattttaaatatgtatgtataccaatttgaggacatttaacctgttactgtttttaagtaagtcttgtgtcatatttctaaaaatattttacaattttctctggagagatcttgaatatcttctgtaggatttgtcttagatacttgaacttgatatcttttgatattttctcttttttctttttttcttttttttttttttttgagacggagtctcgttctgtagcccagactggagtgcagtggcgcgatctcggctcactgcaagctccgccttccgggtccacgccattctcctgcctcagcctcccgagtagctgggactacaggcgcccgccaccacgcccggctaattttttttgtatttttattagagaccgggtttcaccgtgttagccaggatggtctggatctcccgacctcgtgatccgtccacctcggcctcccaaagtgctgggattacaggcgtgagtgatattttcactttatgttctcaagttgtttggtaatggtatatatacatagaaatgacttataaaatatatctggtaactactcaccaaaataaactttcctatattatctatcaaatgatagttttctatcacattacataaaaataaagtttatttcaactttgtattttttatttttgaaaataaaactgtcagtcaaagaacgtcaatggattaataaatagaataaagactgtaaaaatcttgggctcattttttatttaaaaaggaatttttctgacattttctaaaatcaatcaattttagaaaattgtcactgtcttaaaaaaatacatgtcatcttttctactttgtttttatacttaatttttcaagagtctttacaagaatgggtaatgagttttatttcctgcattttatttttgtatgtattaagtcatcatatttattagtcattgaatcagaaaatactataaattttattcatggattattttaaataaattgaaccatccatgtgtaccagatatactctaacttgacgtggtgtattatcttcgtacatttttgggattatctaatgaatctttccctcctgtattcagggtattcaatgtgtggcaaattttataaggactaatatttgtcaaaattatttttattgaattatcaaaaataccactgaagtatattgcttacagtattcttatttaaatttatgttacaaaatgtgaatttttttgcatgaaatctaattgtttttaaacattttaattattatttttacattttaaactttaattttgctaggatgtgttttcataacagttgttccttaattatcctctttaggatcaaatggatcttactcttggttcttttgttttcaactctgggaaatgtgtttctattgttattttaaatatctttctcctctttccttctgtctttctgggacttcggttatctacctgattgtacatctatttctatcctacaattatttttaagcaaagtatttacccatctctttagaaatatggtatgctaatttgtaaaagcgtgagttacccaaatcctcccttatctctcaaagatgtttttatctaaattaaaaggcaatggcctatctgttctaattagtcttcttcgtgtggcatataatttgcaattttacttcatctgcaagccattttactgctctgatatctagttatttcgtttcctgttcccctggaaatagcttctgccctactggtaaaatttgcttttggaggggttaaagcccagaccacagttttcatctgatcatgtggcattaagcggacaggagaaaataaagctcaggttagagagccacagttgatctccagccttatgcagaagcttaattatgcagcaagcgattctgtgctaagatttgtctttgggaccctggatagcaatagccctggaaaggattaccccgtgcagacaggttgtcaatttccagtatcttttataggacttcggtgctgtccagatacatatatatttttgtaacatcggtggtgtcgaacctacttcagggtggtagtgagatgagtagattggcattgactctgccagtgaaatgtttgaagaaggacacagcttccccgggagcccccacccccagcccctgtgtgtctgtcaacgctgtacctgcccctacatgtccaagcttttgcagtctatctacaatttaagacacatttccgatggccaggagttttctcatcatttgttttaaatgttagttggtcatatgtccctctctctttgcttttacagagttgattttgggaagaaagacagcaacattgcttatttttaaaatcacattaggcatgaaattcttataatagctttcatttttttcttattttttaaattaataatttacaataataaaaaccctcccagtctgtcttacatattgtttttactactattttctaacaaggaaaagataagttaaacaaaataaataagtaaataaaaattaaacaaataaataaaagtgaagccctgaacgtttcattaatctcatggttatattgcctgccaataacagctgtaaaattaggtggcatgctttattatttttttcttcctatcttcctttctttattctttatctaatagagacctacatcacagagaaatgtacattttattcatcctagagaactgaaacattttggcaaaaaatgtttttgtaatcttacataaatttttttcgaattttgtttcttcttaaagagtaatgtattttgataagaaatatttaacttaataagaaacacaatgtgactaaatttaaataaaactagtgagtaaaatgcaatgattcttttttataattacattttttggaatagcataaggagcagcttccatttttcaatatcaaattttatcaaacctacaggacatgcatcgggctgtactgatactatggattttaaattttaactatgttgggatatttgaatttgtagtaaaaatagtgaaactgtatatttatcctctggtagtttaattttgctcttgtcacaaatcatgtagatcactcttatgtcttttaacttattaacttgctttgactaaatttttctaattcaaaatcattatagctgaagtgcctctcttagagatagaagttcgaagcaaagaagttggagtcagaagtaaataatttatttggtgtttgaattagaaataaactctttcttctccaaatttagaaaattaatcacaaaactacactgtcaaacactaaaatatcgttatgacagattacatgcagtttaaaggaaatacacaataacaacgctttctatccattagaaatttggcactgtccagatattactgctttttaaattaatagatacctaaaattcgatgattaaaaacgaatatttagatacacattaacaagagctgtttattataattatttgaactaacaaaaactctaagctgttgtaccttaaattttcataaaacaaagtaaactatattatgttactatcaaagtccattctgggatgaagtaaaaaaaaaattttgagggcacaaaaattgatgtaactctcacacgaggtttatcagaaactaggcacatatgcaaaatgtaataaattttataaaaatgtttaagtgacttcacaaatgtttataggtaaaatgtcatctgattaatatgtatcaatgaaatttcaatagaatagtgtatacatttaaatacatacaatggcataggctacacatagaaagcaaagctgtgaataactactaataaccactctagtaacccaaaatatgttttacaggtttcatttttccccttaaaaaataaaatttatatcctaattgcttaggcaacttaagatcttgaaaatgccaccttacattaaaatgtgtattttacacattttcttataagccgaggtaataattatatggtaaatagtgagtacaagaaaaagagataaaattaccattgatttagttttatagaaagaactgcatacaccatattcatatttaatgtgaagctctctgttgcacctctttactgcaaattacttcaggtagtttgtgagaacacctgctgatcttgaacaatgaaattatcagctatctgctttaaaaaggctttcaactaccagctctgaagtgctggttgttcatttgccaattatatggtattcacagttccatagattcaaagacactatatccctctattatagaattacctcaattagaaggtatgagctgaattaaaatatctttatcatttaagcccaaatttactgtcttttaagagattattttcatttgtctcctttaaaatttaatttagccaattggagaatgaaatcaaatgacagaagtcatttattgctattaatcatcatttctaaatgtcttgtaatgtggagaacattatctaggtatatacacacataagaattgcatagagatatacaaatatatttatatatgagaaatctttttataatagaaagatatatgttttaggtatggatttaattaaaattaggtggattttgctttattaaaatacactttaaaaattaactaatagtataaatgaaccaaaagcaattattctatgctgcctgctaacagcaattatcattgccaatgtaggacaagaaatatttttttcaaaatatgtcatataattttataataattaaaatatatgggttttgtaagtcaagtgctctatgggtttaaactttgcataaatatggctaagtctggagtccgattagtctttacaatataaacaggtttcagagaagctctctatccaagtgcttccatagtacaagcaaggttgaattttacatatatgtttgaacacacataagccttaaaaaagttttatttcgcctatttgtatacacctctaatcaaacttacaatcttgttagactaaaaattaactctaaaagacaaaaagggagataatcattattattagacatagattttagtctttcttgctgggaatcaaagaacagtgttcagtctttgtctatgtatctagatgtcgaaggatgcatgtggggatgtgttatatacatttatgtgtcctatgtgtagcattcaaggaaaataaatatcacccccatcaaaatatatatgttatttttaattttattaaaattttgttgaatggcattaatattttaatagatgatattaaaacaaatgtctataatattaacttataaaactgtataaattagttaaatattagaaataacatgaattacatgacttatttagtgttttaatctagtacttcctcagacctctagttagttttactgacttttaaataatcttccataaaagaataaaatttgacaattatataataaaatatgatgtgctcaaagtaattcatatcaaatgtagctggctacaggagaacaatgacaaggtcattgagaatcattaattttcaaatatttgatttcaggtgaacagttggatatgtcactttttatatcaatgaagaagtgcacctgtcaaagaattcttaagacaatattttgaatgaagttgtgcagagtttttctcatgattttttggcatttgaggtatagatggtatttttaaaattgcacatagttaatgtataagttttatgagtttgaacatatgcgtacactcaccatgatcaaggaacaagatactaaccatatcccttaccttcaaacctttgcttgtgtttttgtttgtttgtttgtggtaaaagcacttaatatgagatggatccttttaacacgctttaaatacgcaacattctggtgttaactacaggtgctacataacccagaaaatctctagaactcatttgccttgcagaacagaaaccctatactcattaagcaacaattttacattttccctcccacaagctcctgacaaccattattctattctttgcttcttcgagtttgactatttttgatagctcataaaaatggaatcatgcagtgcttgtagtggtttatttcacttggtataaggttctccaagttcaatggtgtcacaaaggataggattttaagtatctatctatctatatctatctatctatctatctatctatctatcgagagagcacattttctttacccattcatctgtcagtatttatttctcttgtttctacagtttgttttgtgaaacaatactgcagtgatcatggggttgcaggtatctcaagatcctgattttaactttattggatacgtacacagaatttggattgctagatcagatgagagctctatttttaatttttttaatttttgaggtatctccatactgtttttcatagtagcatacattcccaccaacagtatataagagttccaatttttccacgtccatgtcagtattttatatatattttttgttgttgttgtttgttgttgttgtttttgttgttttgagatggtgtctccctctgtcgcccaaaatgaagtgcagtggcgtgatctcccttcacagcaaactctgcctcctgcaggtcagagctgaagctaagggcctgttgcatcacacttccaccgtgctccgacccttatgacccaagaaatagcgcccaaaccgtgatgttaagaagccttaagcctcaaatgtcaagattccttcaacagagtctgagctctagacttgtcaaaaccatctgtgctgccctagaatggaacgagcaacacggaacccaaatatctaagactatctttatttgctttcttaaaaaaaaaaaatgatggctgggtcgggtaatggggcttatacctgcaatccaagcattttgggaggtcaaggggggtggatcacttgagcccaggagtttgagaccaacttgggcaacatggcaaagccctgtctctacaaagaatacaaaaattagctgggcatggtagtatgtgcctatagtcccagctactggggaggttgagatgggaggacgttatgtgtagaatattagactctgcatggtttgctttccttaacctctagtataattttgtagccacatctaaggaatatctaaccattctgatagcagacatgtcatctaatatttgcagttgtccagattacagaagtttttcccaatcaatggaaatctgtaacactaaaaatgttagattatagaattgtcctcaatgacaattttatttatttgaaaataatatttttatctctaccccattttaagctctttcatagtagcatttgcccccaatgaggtatcgggaccactgtaactaaagaagacaatctatcaatctgatgtatcctttaaaaattattcctttaatagtattcggagattataataacacaatatattcagtttcacagaatatgaaattcaaagcccaaaactgcaagtcacctggctctcactcttgagattctatctatgatattttcaacacaaagagagcaggctgttttcactatctgctagataaatacagaaactatttctttagcatcacattttacctactaaatccaacatgcctattattgtaatcatcaactaacaggtaagcatattctctgccatgtgagagttttatacattcttttatctgaacattccattgctacttatttcaccaataccaactcttatggattttttctttaagtcaactgtacttttaagttttagcctcttcactcaactctctttctttgccttaattaaaatatggccaacccctagaaagacagcttcccttgtagcactctgaacaaaagagatgctcctttatcatatgccatataactatcccccaaagctatcttgtatatatttttcactggacaatcctctgggcaccacagcagcactgaatgtattctttcattggttcctatcactcagctaaactattcattacacccaattcattaccctaacatccataatgcttagatacacaaataaatatattggattcttcctacttcatacattttacatgtcacaatatcttaaaaatcatttcatatgtcacgatgcttataagcaatacttcttattaataatattttatctgtctgccttcattagagatgtactttaataaaagatatttgtaaagggaaaaacagatgacacatttgaattaacaattccttattacctttggcttaatcttgccttgatgatgtatttatgcatattgacgagagtagagtgagggctattgtaatgatgtgttttacaatggcattattatttctgtattctcttaagagatgttaagactggattaagaatctcagagcacacacataggtcatcagtaatctctaaaacatatctcagtaaactaaaggaaccgtgtcaaaatatgttttcctgaaacagtttgataatttcaaaaacttttctccacttaacgtagttgttggaaaatctttctacatcttttcaagtgtgaattacctcggatcagagtaacatagacagaggaacattaggtttttttgattttttgtttttgtttttcttacagattttaatattagtcaatcagattcaatataaaatattgattctaactgaaatgactctatatgtttcaaagaagaattaaaatatttctccatcagtccatgtatgacttattattctgttgcattgtacaaataaagtgttatagaaacgagaagttcaatattttggaggctagaaggctaagatttactacactgttctatgacctttaatgctagcatttataaaataaattcactaattccttgtatgtttatcatttcatggaggatttgaaaaaaatgatattcagttaaatgcattgaatttaaaaacattttatgatgaacaaataaatgtatacattatgtttaaatataaaacacatattaattaaatataggcaacattttattaaaaagtttaagtgcttagttacttcaaaatattgaaatccaaaaactgctttgctttcacctttttttttaaattaaatttcccctttctgttggtttatgttagttcctgtacgtcttcaaattgactcttagaattctttttactggaaaaaaattaataaaaatgttgcatgcaataaagaagaatattattaggaaaaattaatcttgactttcttcaccttttcaatattaattttaactttcatattgaattttaattatttggtaccattattaaaattttctagtgtacttaccttaaaattgtacagaaagcacttactttattacaaatgtaaaataattacaataagcagtatttgtttatgttgaatttctacctttttactctttcaaactgtctatggtttatcgactgctacttttactaaagaaaagtgactctttttaatgatatcattagtgatatatatatataaaatacaaatcacctgttaatttagcaatgtaaaatgtggcttctaaggaattgcattttagtaatgaccttcttgcaaatttttttaatgttagaagtatttgtagataaaaatactttctaaataaattgaatgttggtctctgtctggaataaaacactgaatcaaaaggatctacactgccatcttctgtcatgtatggtatcagataaatatctccaagtaaaatgactgaaaaaattttattaaatacattaacttccctcaaactatttcttagtgatttgttatatatgtttacccttgatttatacaaattcatgtaacgtttagctactaatgatgagtttataaccatgtaagtttataaccataaagccctgtaagacctttcccatattaacaataaagcaagctgtacttctttaaataaatgaatatttttaaaaaggataaacagactgtattttatagggcattctgcctttaaacccttccagtccattacctccaatggaatgatagtgcattacatcagtagtcattcattgaaccagtttctcttatctggtggacttctgctgttgattattatgcattcatttgggagagaagaatatagttacattttaaaaaagaaaaatattaaatttaagaatttaagttaatggagacgacacaaagacaaattctgtagaatatttgtcagaaacaaaaaactgaaaagtaaagacaagatttatattgatatgaattgtattgctggaatacggaatccatcctttgctctctgtctgttccccaatttaacaaatcctctttagaaacgggtcctccccaccacaccaggctgcaaagtaaagtcttgtttaagtgactgcccatgagaatatttattctacaatattgaaaaataccaaatgggaaagcatttagaagacatatttgaggctctgtcaaaatattctattatctttatttctcacaatactctaaattgaaaagaacctgacattaattgaccttgtgacatgctgaaaattttatatttaataaatttaaacatgaattaagcttttatagtttaaataactatacattttctttgaaaaatacataccacattaataactgtgagctatagaaaagtaaactttaacattatagtaaccaaaataaaaattttactgagatggaatctaaaataggataagcacatagcaaccctaagtgacagattatccagtggttttaacaatttctaagtaatgattcttattgttagcatagcatatagaaagaagtgaaaaaacgttttccagataaaatcattatctttatctatcataatctgtagcatcagaagactacatataaattttttaaagtgtctacgatttgttacttatatatgtctgagaacaaggtatttttggtctgatttctcctatttctgtatcacatatattttagaaaaatagatattctttggagccacaattgtcatcaaatgtgcttctcacttgacacaaattagtgaaatagattaatagaaggatatgcatcactattggtatcactatagataattgtatatatttggaaagccaaataacaattctagaagacttaaataaatgcaaaacatatgttcaggaaaatatacaaattatatcaaaagacaatttcccactgagttttaaaattagattaatttagacacaattatgatgaccttgcaaaaatgcattaaactttttgatctttggttttttatgctataaaatcacaggattgtttggtaaaatctaaataagttaatatataatagatactgaaaattaaagagtgatagaggtaggaaaacaaataaaggtagagatagaagaaaaaaggaagaaaaaaaactaagagagacagagactgaattaaaataaggacttgcaaacagagtttcaggacaataccccagttgctaataggcaaatttgggttaatagaaatgtaagaggttctggacaaccaagaacagagggaaagaggcagagcactctttggagaaaagttcttgggcttgtccagattgtgagaccatgattcttattcattggcccacgagctctcagtgcacaatacccttctctgagaaggaagtgagacagcagcaggctcagttgaggtgaggttaaagcagcgcagagatatctactgggaaagcaagtctgtcagctagcgtgctacagaacgtgaagtccaaggatgagggattcctggaatttggggttcctggtgcaagggccatcactgtcaaactttgctccaggtggtagttggaaataaaaatgtgtagggcttcagttctgataacagagtttacaagagaatcaaagcctagaatacatgtaaaataagatattacttagctgatcccaggttcatgttacaaatactgtccccactgtggtgcaaaaaaaaaaaaaaagggtttgaatttctcttgacctcatagtgtcagtgtcaaggttatgttatcgtttattcagcataaccggtaagctactatagtgtccctaaatttaaaatgatcttactgtttacatgagatagtgagaaaaaagttaaaattttctcatggattttctaatatttacagtcacactgttttgaagctgaaagctatagatgcttgttgtgagaagattaaatgcccttagagtccaatctcgagaacaaattgaccctaaatccccattgacattttatatatgtgcaagtattgaacttgagaccattgtactgactggttttaatgaacatatccattattttagcaggatttatttttctgatatgtatccatgttttcctcctgcttaatgatgtttattcaatagcaaactaataaagattcatacatttgaatgcagataaataaatgttatatgggcaatatttttctttaaaaaataattttttccaacagaccttggtggagacatggcttttatcaaaaccagaacataacaatgtacatatacatttttgaaaatataaagttgttttatgcaagcctgatagtgtgcttagataaaaataagtgttttattataataaaatctgaaatttttgaattgaatatgtaattgcaaggcttgcttttatttaaatgtttaatactaattatggctaattaatatttagcataaaccagtataactagttttaatccttgttatcatagtgctgaattttgttcttgtgaatataaatttaattgattgtttatagagtagtataatcttttactttcaatataataaaagaagaaaaaacacttttacatattattgacaaaatattttaaaatgaattacacttggatttattgttttctttataacccaaagatggaatccaatgtcccataaaaataatgtacatgtacacatatactgaatgttcgttcattaaaggattgtattataatccatgttaatcacgaaaacaagaggtagatatatttggaagtagtttacaaaattcattttatgaagatcttaccattcattaccggcttttagccattcattatttgggctctcctagttactaaatctaagtaaactattgaatgctgcccttttctgactctatgacagaacgtgacctaaaatattgtttgatgaaatgaatttagtgcaagaaaaagtatgaaatatttgtcatacaggactattcaaaggtttcatgataccaaaaatgaaatctagaaagaaactaattgattaattaaatgtcataaaatgaacagctttttcaatatcaaaatcatgttaaaaggatgaaaagacaagttcttactgggtgaaaatgtttacaatctatatatccagcaaaggactagtatctgaaacatataaagagttctcaaaattcaaagcataaaacaaaacaaaaaaaaccacgtaattagaaagtgtgcaaaagacatgaagaaaaattttaccaaagattaaaaaaaaacagcaaattagcaaatcaaaagatgttaaacttcattaggtatcaagaaaagacaaacaaaaataagatattaccatatatctatcattatagttagaataatgaaaaacaaaatagtgatggaatgctggtgaggatgcagagaaactattccatatacattgttggtagaatgtaaaatggtgcagccatcctagaaaatcatttggcagtttcttaaaaacatgaagtgttcaatttccacacaaaccattaattgtatacttgagtatttattccttagaaattaaaatgatattaacttaaaaacctttaccttgatattcatattagcattattcattattgcaaagcaatactgaggttgcagttataaactaagctatactttttattggagtactctcaactaaaacaattccttcacctcaaaaatcattatatttgattttccatcaagcaagtgcaagcataagtacttcaatttcaggattctgaacccctggagaaccttaaggaaaattctgaaaatatgcaaacaattacagttatgaaaataagtttgacccacaaaattctggaatatattttatttatccagttttcttttctatgattcattgtaccagagcataaaacttcatgtgaatacattgtgaattcagaattatcaatgtactttatcaatctaaatacatcttatgccacataaagatgttttagttaataatgaatagcatatttagcagattataatggagctaaaaaattcctatttcctaatgacattgtagttgtcataatgtcgcaacacaatgtgctattcatgtgtttgtggtgatgtcggtgtaaacaagcctgctgggccaccagcatataaaagtatagcacatacaattatgtgcagtacataatatttgataatgatgataaacaaatatgttactggttcatgtgtttactctactttttgttattattttagagtgtacttctacttacaagaaaatagttaactgtaaacagccgcatgcagatttctcaggcggtgtttcataagaagacattgttataggagatgaaaactctacacctgttattgcccctgaaaaccttccaaggtgccaagatgtctgggtggaagacaatgatattgatcatcctgaccctgtgtaagcctcagctaaggtgtgtgtttgtatctaagtttttaacaaaaagcttaaaaaataaaaaaatagaaaaaagcttattagaataaggacatagaaaagaaaatcttttctgtatagttgtgcaatatgtattttaagctgttattacaaaaagtcaaatagttaaaaaatttaaaaagtttgtaaagtaaaaaaattacactaagctaatgttaatttattattgaagaaaaaatattttgtgtacatttaatgtagcccaagtgtacagtatttatgaagtctacaggagtgtacagtaatgttttgggtctttatgttcactccactcactctctgacttattcagagccacttctgttcctgcaagctacattcattatgagtttcctatacagatgtaccatttttatccttgatacagaattttaatgtatcttttctatgtttagatacacaaatacttaccattacaattgcctacagttttcagtacataatgctgtacaggtttgtacctagaaacaataggctataccatatagtctaagtgtgtagtagactgtaccatctaagtctgtgtaagtaaatgctatgctgcctgcacaatgaatacattgcctaaggatgcaattcttaaaatgtatccctgtctttaagtgacatatgatagtgtcaaagggatcaaaatcctttatcatcacagtgaagttatttggaaaacacagaaagttactttcgtctggtttccatactaatccacgcaaagaaaattcaagagtttagtgttttgttttttcttaaaatgtaaatgcagaaaaaagacaacattagactgtaaatatcaattatatattaagaccttttatttaaaaaaaaaaaacaaagatgggctgggcacagtggttcacaactgtagtccttgcactttgggagggtgagcgggaaggatcacttgaggccaggagtttgagatcaccattgggcaacaaagtgaaaccctatttctacaaaaaattgaaaaataaaaattaaatttagcctagcatggtagtgatcacctgtagtctcagctatgggggaggctcaggcggaagagttgcttgagcccaggagtttgaggttgcagtgagctgtgatcttgccactgcaatccagcctgggggacagagtaagatcccatctcaaagaaaaaaaaaaaaaaaaaaaagaaagaaaagaaagaaaaaaaggaggaaagaaagaaagatgatttctgttgtttctgatttcatgcataaaaaattgtgaaaaatgagtgagggacagctgcctattagctgtgcatctgtcagtgctatatcattttgatctcaacaaatataaaatccactgaaattttgaggccttttatttagtagctcaattatgacactgaaagaatgaaataaactgaaagtgaacaaagaagagatagaataccatagtagcttagagcttatatttttggaagagataaaattaaatgtaaattccgacttgcccacttgctggtaattatcatctttgggcttcattgttatccacaatgtattataaacatacatatataaatttgttctgtgaaaaatatattcccggccgggaactgtggctcacacttgtaatcccagcactttgggaggccaagcggagtggatcacgaggtcaggagaccgagaccatcctggctaacacggtgaaaccccgtcgctactaaaaatacaaaaaaaaaaaaaagaaaaaaaaattagctgggcgtggtggcgggcgcctgtggtcccagctgctcaggaggctgaggcaggagaacggcgtgaacctgagaggtggagcttgcagtaagcctagattgcgccactgcactccagcctgggcaacagagcgagaacccgtctcaaaaaaaagaaaaaaaaatttccagaaaaatcatctaaatgagactcaaactcagctttaaggatgtttgtccacataggatgtgctgtcatctataatctgagtctcccttatcaatattccataaaagtccaggaaaatctaacatctcattaaaagatgcagaatgctatggatgtaatactagggtaaaacacttaaaaatagtggatgaattaaagttcacatggctaaaataatgttctgtttctttgtatcccttctttatgttcaatattattttttaaaatatgtaaacaaaacataatttcaaaatatggtcttaatttctcactcaaaattcactgaaatctgagaccagatggtaatgcatacgtttacatgtgaacaaagcttttctggaaagtgcatgtgatgaaaaactgtggttttgggaaccctagtgtgtgttcaccagagtgcagtagtcaccccattctctgcagtttcaccttgtgtggtttcagataactgtggtcaaccatggtccaaaaatattacatggaacattccagaaataaacaattcatgttttaaattgtatgccttctgggtagcatgatgaaattttgtgctaccccactctgtcctgcctaggacacggatcatccctttctccagagtagccacactgtaggcgctccctgccctttagtagccacctgggttatcacacagactgtcatggtggtgcaataatccataaagtgattcctttaagttaaaaggtgaaactttaccataggtctgtttgtatgtgtaggaaaaaaagtatctctactgtccagtactattcagaattttcggcatcctctgggggtcttagaatgtgtatcctgcaaataaggggagactaatgtgtttagtaattttttgttacggttgaataattcatttttcaagttgttcttacagatttcctactgccatgtggaggtggataaatttcaatatagcaatgaagacaatttgtcacagccttgattggattgctatgattaaccaatatttagtgaattataaaagtaggtttgtgataatctataataaaaataggaagaatttaatgacaagtataatcatgataatatcttgcatgatttttaatattatacctatagcagcagagttatatgagaagccataaattggattcattataattttcctccataacctgtaaaattgagggacagctgcctattagctgtgcatctgtcagtgctgtatcattttggtctctacgaatataaaatccactgaaattttgagaccttttatttagtagctcaattatgacactgaaagaatgaaatgaattgaaaatgaacaaagaggagatagaataccatagtagctaagaacttatatttttggaagagataaaattagatttaaattccgacttgcccactttctggttaattatcatctttgggtttcattgttatccacaatgtattataaacatatatatagtagtgaatactaaataatatgtcatgtatatcatactttactcattgccttacataaattatatgaaaattcacatgtatatttatttacatataagtatataattattaaaaagattttcttcctatagtattcattatcaaatgctgttattttaataaatagccagttctcttaaaattacacatgcaaaaattattgttgaaaaaactactcaaatagaaagctgttgtttatttggggccatcatcatcttcattcagttataccaagtgtatcaaaattaaaccaaattataaaagaaatttaattttaaaaggaaaatatcaggggccatgcttgagtttattttttgaaccttttatatttacttcaccatacaatattaaagttcatattactatatctccaattcagtgcaaaataaatgcatgcctgctggaacatatcaaattactttcactgtgtttgtaattgtacgttataatgttcacttaagcagactacctgactaatcataaaagtttactccaaaatgttctagattaatggagattttgccatatatctcacagcttagtttgagaggttacagcatatacttaatcactgataattttctaaattttttattgtgaaatgtgcagtgttgaaagttctcagttcttgtgacttgttttcgaatcgttcatttctaatttatgtaagtagctttttttttaaccagcaatttcataaagtagaagaggttatactaacgctgctttgaacaacaattttaatgttgttatcgttaggtgctcattatttttcctgcttttactatcaataaatatatatcagtgagagcttttctcatgggaatccagaaatgaactctccagtaagtgtaagagggagataggcacatcctcatcaaatcttcatagattaacaccttgaagcaagatgataatatgactaatttcctgtatccaatacgttttgcctctgcagttgcacatgacaagtcctgcacagcttaatgaatacttctctggaaatatgggactccaggcttctcgcgtccatttattgcacctaggtttctccatccttttacatccaaacgatgtgccaatgtgctcctcttttattcattgttattaatttcattgccacatactcattgtccaaacttatgagatatggtaggatatttcattacatatgtacaatgtacaatgatcagattagggaaattagcaaatccatcacctcaaacagttgtcacttctttgtgttgagaacatcccaaaccctctcttctagctatctacaaatatgcaataaattgttagtaatatagtcaccttacagtgccacagaaccttaaaaatttttccttccatctagttgcaattgtgtatatgtgaaccaacctttccctatctccccctcctgttaccctttccagtcttttagtaaccactattctactccttccttctttgagatcaactttaatagcttccacatatgagtaagtatatgcagtatttatctttctatggctggtttacttcacttaacataataaaatgtttctacagatttgcctattctggatgctttattcaaatagaatgatataatatgtggtctttcatgactaacttttttcattctgtataatttcatcattttgtaagagtcatccatgctctagcatgtttacacacttgattgcacttgattgtttttattgctaaataatattacactgtatgtatatctagaaatggaattgataggtcatattacagatctatgtttaacctattgaggaaatgacaaattcttccacataagccaaactgttttacattttcaccagcaatgtatgagaatttccattttctaacttcctcaccaacacttgttattgtctggcatgttggatatagtcagcctaataagtatgaagtgatatttcactgtggttttgatttgcattccctgatggctaatgttgttgaaaattcttttatgtgttttggggcatttctatgtcttctgtatgtgaatatctatttatattaattgttcatttttaactgagttttgtatttttatttgttttctattgttttaagaattcattataaattctggataaaagttaagtagtagatttataattcttaaatattttctgcaacttaattgattgtcttattaatattatcattgacattattatacacaccataaaaattaattgtaatgaagtaaaatttcttcatttttctgttaaatgtatttttgctgtaatagctgaaaatctattgcctatgtattcttctaaggttttatagatttagatcttaaatttatgctattttatattttgagttaatttccatgtaagctctgagggaagacattgtcttggcatcattatagagaaacaataatagaggaacaattaaccattgctatccgtagagttagtagattttgtttatctttacaaagaagcatcatttggttttgtaaaatttctctatttttcttttactgttttcaatttcaaaattttaactctgttctttattatttcctttttactacttgatacatgctcgggttgcttttctgtttatagtgtcttaaggtaaaagtttaggttatttttttcttttttgatataattcttttaatccaaaaagtatctcagaatgcataacttatggtaagagagctaaggggctaagtcaacaagagtagttctgctttcatatgatttatgaactgatatttaagaaatattttgttcgaaatacaggctctgtgagtgtgcctgtgtgtatggtttaaagcaaaatccaagtcttatggagaaagttacttgaagcaaagaatgtacaaaataccaggacaattgtattaaattaatcataatgtagtataagatatgcaaagggtgccaggcattgactctatctactttataatcttgcccttcaaacttataatagtaacatttttatgcaacttaaagttattggaatgcttatttaggaactcatgatttaaaaacacacgtaaaacaagtaacagagagctactaaactcatgtctcaagaataaatcgagtgtgcatttgattaggtgagtctcatcttaaaatgcattatttttatgttttttttcattttaacatttcttttgtttaaacctaatataaaaaataatatcctaaattctggcctttagtgaagaatagtacaataagatttgtatacttctagagtgagctgggtaaaaaaaaaaaaaagggaaatatgctctaatgagtatttagctgcttatcaattataaaatgtcagagaaaatatatctagcataaataaagtttttgcttctaattctagtagtaaatattacatctagaaatcttagaacacctaaaaaattttgagaaaaaaataaatatcatttataagttgtattggtcaatagtagttaatatactactattttttctgttatatatttctttatttttgaatggaatctgatatagtttagatttggggcactgcctagtggagctgtgagaggagggccactgtcctccagactccttaaatcgtgcatctggaaaagccacagacactcaatgccagtcagtaaaagtagttgtagggaatgtaccctgcagagccacagaaacagagatgcccaaggcctgaagagataaccctttgcatctgtgtggcctggatatgggacatggagtcaaagaagattattttggagctttatgatttattgactaccatcctggattttggactttcatgggcctttgggtcctttgttttggctgatttctccctttcagaatgaatgtatttacctaatgcctgtacccctattttatcttttttttttttttttttttttttgagatggaatctcactctgtcgctcaggctagagtgcaatggcacgatcctggctcagtgcaaccttcacatcccagagcaattgttcaagcaattgtccttcaagcaattatcctgcctcagccttctgagtagctgggactacaagcacttgccactatgcttggctaatttttgtatttttagtagagacaggggattcaccatgttggccaggctggtcttgaactcctgacctcaggtgatctgtctgcctcggcttcccagagtgctgagattacaggtgtgagtcaccacgcctggcccactattgtatcttggaagtaactaacttgtttttgattttacagactcagaggcagaagggacttccttgtctcagatgagacttctgactacggacttttgagttaatggtgaaatgagttaagacatgagagactgttgagaagggagaattctattttgcaatataagaaagacatgagatttgggaggggctggggcagagtgatatgctttggatttgtgtccccacctaaatcttacgtcaaattgtaatacccagtgtaggaagaggggcccagtgggaggtgatcggatcatcggggcagatttccctcttgctgttctcatgatagtgagtgagttatcacgatatctggttgcttgaaagtgtgtagcaccttcagcttcactctcttcctcctctgcccatgtaagatgtgccttcttcccttttgccttctgccatgattttaagtttcctgaaacttcctcagacatgcttcctgtacagactgcagaactgagtcaattaaaactcttttctttataaattacccatctcaggtaggccattgctaggtctttagagcaatgtgagaatggactaatacagaatcatacacgataagctgtgttaagaggtttttattcatagaagcatatatcttgacctaagtttaacatttctaatgatgaaaagacataagggcattacggtggaaatgtcctctttataccgtcttattgcacttgccataacagatatcagcatccttaacacaggagggaggaagctttccctccatgcttcagagtatgtttttaacttaaataaaaggtaatttcaatgaaataagtttactgtgtaactttagaattggatctaaggtgcacatgtgttattgtatttcagtgttatttattgcaaggaaattaatagttgcgttttaggtggtaattatttttcattcttgggtttttatttctacttgtatattcagtagcatccctaagcaaaatattataacaccaacaaaatatttttcattaacaattttttgttagaataataatgaggcaagaacaaagaagctatgtataaattaaaaagaataataatatgtcaagcataatttttttaaaaggattcagtaaaccaagttttaaaagactgtagagaaaaatgtgggtagtgggacatattatccaatatatccagatgtgtaattcatataaggaaaaaagctgagatacctctgaaggataatgatatccagtttgccatatataagttcataagctgtgtactttacaacttaaccccagttttatagtttaacattttctttttctaccctattccgtggggactggattctctaactattcattaattatcaactctactaacaagcaaagcttttcaaagtttagcttggttcttataatagtctgttcttgtcttgctataaagaaatacctagactgggtaattcataaagaaaataggtttgattgactcatgattctgcaggctgtacaggaagcatagtgacttctgtgacggcctcaggaaacttgctcatggcagaaggcaaactgggagcaagtatcttacatggctggagcaggagaaagagagaaaggagaggggcaaacacttttaaacaatcaggtctcgtgagaactttatcataagaatagcaccaaagggagaaatccacccacgcgatcgaatcacctcccaccagtccccacctccaacattggcgggttcaattcaacatgagatttaggcagggaaacaaatccaaaccaaatcagttccattcaaaaacataaaacaaggtaatttttgtcttgatggtttgattatatgaactaaaattatagcaatagggtaactgcataataccatttaatgtccatatttgccatcacttgagagagatacatgactcataatgaaaggcttttaagtaatcagaaattcgtaacacaataattaaatcaatttttattgaagctatcagataagtaagttattctagactacattcttttctccaaaagttaaataaatcaataaatagaaaatagtatatgtacatttaacatttttcaggtgaggaaggattatgtagaatcaggagaatgagacaaacattcatcaatcactaggataacaaactaatgataataattttgacttctagtttccagtctggcatgtaagaagctttaacccacctatctatcgtaacaacaaataaaaagctgaacaaactgaaagatcaacaactcttcttagattcatccgaaaaatgaagttacaggggaaactaccgtccccagaatttgaggtggattggaggtggataggtggatgaaatcacaacttatcagatcagaaatccaccaacagaaaaagaggaagcagtagtaggggaggaaaacctgaactgtatttgatgcattctggtgagggaagtggaaaagtaaccactttgaaatatgccagaacattgtctcttgcttacattgaggcctgccctcgagagaaattattttaccaaagcctaatctatcaatatcttatcaaagttttactgacttggtgaaagagaaatacctaactccaaacccttctaggcatcaagaatcaccgaagagggttaaaaaaaaaaaaaacaaaaacacaaaagcaaagactagaagcatttgtggggttcacagcccaggggttcaggcatactgaagtatagagaactaattctaagaccataggacacttcttctccacatcttcccaccacattactaaaggcttattttccacagattcttttacccaatagattacgtcactctttcaacaaaaacaacaaaattacaagacatgtaaaggggaaataaaacagtttgatgagacagagtaagcattaggacaagtcttaggtatggcagagatgttagaattatcaaaccatgaatgcaaaacagttgtgattaatataataaaggcactaatgaaaaaagtatacaataggccagaacagatggataatataagtagagagatggaaaatctaagaaagaataaaaaagaaataatagagataaaattcaccataacataaatgaagaatgcctttgacagatttttcaatagaaatttcaaaaactgaaaagtgaagagaaaaaagactaccaaagaaaaaaagaaaggggacagatgtccaagaactgtgagacaactacaaaaggtgtaacacatgtgtaatggaatactagaggagaagaaaggaaggaaggaaatatttaaagcaataatgatgaagaattttcctaaattcatatcagacaccaagctacaaatcaagaaaaatcagagaatgtcaaacaaaataaatcccaaaaattaaaataaaagtacactgaagcatatcatagtcaaactgcagcaaatcaaagataaacataaaatcttcacagaagccagtggtggtgggggaagaaacatctcatatatagaggattaaagataaaaataatatcaaacttattcgcaaaaagtatgtatgcaaagagagactagtgcattatttaaaaaagtgttgatagaacaaaaccactggcctagaattctgtactatgcaaaattatctatcaaagtggaaggacaaataaaggctttctcagacaaaaattgagagaatttgttgccagtaaacctgttctgcaggagatattagaagtccttcagagagaggaaaaatggaaaagtttagaaggttggatctatatcaagaaaagaagaacattagagaaggagtaacttagaaaaaataaaatgttttatttttcttattctaactgatctaacagataaccatcgctcaaataatagcaaccatatatttgattatgtatgcatatatacaaatatatttgtgtgtgtatacatatgctcacatacatagagatatatagagagagatatatatatttgaatgcttgagtttaagtaaaataaatgacagtaagaaaaccaatgacaggaaggaggaatgagaattattttgtaattattaaatacactattcagaaagcagtaagatttcattttaaaagtgactttagttatgaatgtatactgcaaaccctaggacaaccactaaaacaaataaagaaaaggggggttgtaactgatatgctaagaaaagagagaaaatagaatcacattaaatgattaattgaaactacaaaacgcataaaaaatgcaacaaaaaataggaagaaagaagaagggcaaaaaatagaaaacggtaacaaatatggtagatattaacctgactttatcaatgatcactctaaatataatttgttcaaatatacaattagaagctagaaattgacataatggattaaataaaacagaaactacatattatctacaagaaactgtgtttaaatataaacataaaggttaaattaaagtgataaaggtaaaccattctgaaactgatcaaatcaagcaattaattttagacagagcagatttcagagcatggaaagttgttaggaataaagagggacatcatttcataataaaggatcaattatacaaaaagacaaaatatttcatatagataatgatgcacctaaccacagagcatcaaaatatgaggtaaaaactataaggaggaaacgatgaattcactattttagttgtaaacgtcaacaccactgtatcagaaatgggcagaatcagcaggcagaaaatcaataagaacatagttgaactcaacagcatcatcagtcacctggatataattgacatctatagactacttcattcaataacagcaaaatacacaatcttttcaagctcacatagaaattcaccaaaatagaccgcaattctgtgacaaaaatacacgttaagtattttttttaaatggaaatgatgcaatgttggctctcaagcaagagtggtattaaactagaaattaaaaaaaaaaaaaaacagacagctgagaaatcccccaaaaattcagagactaaacaatgtatgtctaaagaagaaatctctgggcatatttaaaattattttgaacttaaacaaaatacaatttattgcaatttgtgaggtgtagtgaaagcagtgcttagaggaaaatgtatagcactgaaggcaaatattataaaagaagaaagatttaaaataaataatcaaacttccaagttaggaaaaacagagaaaaagagcgaattaaatccaaagtgagatgaaaaagtaaatagtaaaaattagagcagaaatcaataaaattgaaaatagtaaatcaatgtagaaagttaatatttaaagcttgttctttgaacagatcgctaaagttgatagccaagctaaggaacaaaaaaaaagcaagagagagagaaacacaaattactgataatcagaaatgaaagaggaagcatcactacacattccatgaacatgaaaaggataataatggaatactttgaacaattttatgcctacaaatgtgacaacctagatgaaatgaaccaacttctagaaagatacaatctgccaaaactcacacaagaagaaataagaaatctaagtggccatgtatctactaaagaaatttaatctacaattaataaaattcaaaaacagaaagcaacaggcccaaaggggttcactagtgaattttcccaattatttaaaaatcatgataccatttatctacaatcttctccaagaagtagcctgaaggaatacttcctagcctattttatgggcattatactaatatcaaagctagacaaagacattacaagaaaataaaactacagacctatatctcccatgaacttagatgaaaacattctcaagaacatattaacaaattgaatccaacaatacataaaaatattaatataccacaacgaagacccagtgacatttatctcagttatgcaggcctggttcagcatttgaacattaattaatgtaattcatcacatcaacatgctaaagaagaaaaattacatgattatatatctatataccacttaatcatgatgaaaagtctcagcaaacaagaaatggaggctagcttcctcagtgtaataaagaattcttataaaaatcccaaaagcaaacatcatacttagctttcctgttaagatcagaaacaatccaaggatgtctcttctcaccactgttttccaacattgtactgagtgtccttgctaatgcaatgagaggagaaaatgaaataaaaagcctacagattgggaaggaagaaataaagctggctttgttcaaagctaatatattcctctctgtagaaacttatatattcctctctgtagaaacttctaaagaatggagaaaaacaactaaaaaacttctggcactaataagtaattatagcaaggtcagataatacaaggttaatagaagatcaaatgttttcatatatagcagcaatgaagaaatgggatttgagattaaaaacacattactatttacatgagcaccatcaaaaatgaaatacttatgtataaatctaactacctatgtatatctatatgaggagtactatggaactctgatgaaataaatcaaataaaaactaaagagagttgttttatgttcatgggtatgaaggttccatattatcaggatgtcagttcttcctaacttgaaccatagaatcaatgtaatcccaatcaaaatcccaggaggttatttctattcttggatatcaacaaactgattgtaaagtttatattgagaatcaaatgatccaggataacccatagatcatagacctaaatgtaaaacacaaaacgataaagctcctagaagataacttaggagaaagcctgatgaccttggggatgatgataattttttagatgaaaaactaaaggcacaatccatgaaagtaagaattgataagctgaacttcattacaactaataactcctgctctccaagagacatggtcaagaaagttagtaaaatacccacagacttcaagaaactatttgcaaaaaacacatctgataaaggattgttatccaaaataatgaaataactttttaaaatcaacagtaagaaaataaataacatacttttaaaatggtcaaagagacctgaagagacacccgaacaaagaaggtaaataaaccattaaggaattgcaagttaaaacaacaagataccactatgtagatacttattagaatgaccaaaatccaaataatgatgacaccaaatgctgacaaggatgtggagcaaaaggaactctcattcattgctggtagaaatgctagatcctacagcgactttggaagaccttagtttggcagtttcttacaaaattgatcatactctcaccataagattcaccaattgtgccttgatatttacccagaagaattaaaaatttatgcacacatgaaaacctgtgcatggatgtttatagaagctttacctataatcaccaaatgcaatcaagatgtccttcagtaattaaacagataattatactctgacacatccagacaatataatattatttagcactaaaaataaatgagttatcaggccttgaaaagacagggaagaatattatatgcatatggttaagttaaagaagccaatcagaaaagtctgcatttgttatgattccaatttataatattgtgaaaaaagcaaaactgtggagacttaaaaaatcaatggttacctgggattgagaggaagaggagatgacttggtggaggacaaagaatttttagcacattgaaactatattgtatgatactactataatggtgaatacaagtcattacacatttgtccaaacccatagaatatataacaccaagagtgaatcttaatgcaaactgttggcttcagatggtaatgtgtcagcaggttcataggttgtaataaatgtgccatgggtgccaatagtggggtaggtgtgtgtatgaggtgggggacaggggatatttgggaattctgctctttttgctcaactttgctataaagctaaaactttcccccaaaataaaaaagaagtatattttaaaaaaattcagtgccaatactgtaaaaataataaagtatgaaagtatattatttatgttttgcattgttaatgctctaactgaaaatgttcttaatattggttctaattgctgaagactaggctatgattaccaagaaacttgtcctgtgacaatctatgcatattagcagaagaggcttgcctatggaaagagagaaatacagctaactacattactgcttcatacattactgcttcatttcattcgccacatatctgatttggtttttgaaagatatccactctcttcttcattctggatcattgattgtcagtggaatctttacccacccatttagatcctgtaagaagaaccataagagaagtttcctgatatgtaaagcatactctccttgtatattcataatcaatacatttaatgtgatttttttattctacggatggataatttttgaataaaatgcgtagaacatagttgtataagtgtcacgacacacttggaggtcatttccagagctcactaaatttaagattttatttagtctgtgtgacaataccaaatcaacattagaaaaatacccttaggaccacagtcgttttaacccaattacctctctgaatctattcaatttatttacagccatagtagctgttctatttggcatttctatttttcattgtcacttctcattaatggactggttcagttcatgtcatttgatgacttctgcattgtcattttacttcattaactgattattttctaattgctattttatgccactgtttgattcatcagcttttaatattctgcttaattgacttctttgtctaaatgatgtgagggataatgtggccgaatttattatttagcttccaaattatgacatagtgaaagctcagttttgttgttccattttctagatagtaaaaataaggaaatatatttgcattccaaataaacacctttcattaaaatattcttacttcctgcctttttcaattccttgtcaaagataaatagcttcagagacatctaagtatcatttctcattttttgtaagattacatttcatgagatttttaaatcacaactcagataacattttacattatttagtaaaaaattttaaatcattaacctgggaataaaagaaattggtgattacagcaagagtgtgtttggacttttatcagcagaggtagcattatcaaatagtaattttactaacaaaaaaattataaagtgctgaagctcaatttatttttacatgtttaatattttcttattgtaactctcactgaggaggaatctaggccacaaacagtttaacctgaccaatttcatgtagcaattaagtgacagagctgagattcaaagccaactttgcgtaacataaaagcctgagttctagctatactcttacgtaatggatcatgtggagtccgaagtcaggggatacatatagtgctgagaaacaaagataaaagctcttattctcaacccatgacagttatctccgatatcttcattgacaaagctcttcaaagtcctaatctttctgcttacttgttagccatgatgcataagaatctcattcaaagctagaaatttggtccatagagcacaaaatcttgggtatagcataaatacctcacctggattgttaccatttccttaggatactccactttcccctattctcacatgaaatacaaaaacaggccaggcgcggtggctcacgcctgtaatcccagcactttgggtggccgaggcaggcggatcacaaggtcaggagatcgagaccatcctggctaacaaggtgaaaccccgtctctactaaaaattaaaaaaaaattagccgggcatggtggcgggagcctgtagtcccagctactcgggaggctgaggcaggagaatggcgtgaacccgggaggcggagcttgcagtgagccgagattgcgccactgcactccagcctgggcgatagagcgagactccgtctcaaaacaaaaacaaaaacaaaaacaaacaaacaaacaaacaaacaaacaaaaaatacaaaaacagccttcctttatcaaagtgggagaaattttcacgtctttgatctcaaacggtgtctcttcctctttttccgtttgaggacatgtctgaaattagcttaagcatctaaatgtctgatgcaaaaacatcagaaaatgcagacattggacaatttgattcagtgtgcctagaaaagaggagaatactgtgagcaattctaatgattcaatacatgattctcccacttaagaaaacaaataatgttcatacagtgtcataaatgctttaatggataattacacaacaggtccttgaaacttgagaccaagttatctggggagagggcatcatgatatttaagctggattataaagaatgaacaggaatatattgaagcaatgaaatgagaagctatgtgctaggaagcagtctgtgaaaggcagggaaaacaggacctgtgacacatttgcaaaggctcaacttgctaattatgacaaagtaagtgatttgaaagtcagcagtgggaagatgtgctgggcgggagacggcaaccacaaggtcatgaatggtcttaccaagcacaggtatttaggcttttcatcttggcctgaggagcgctccaacttcttcaagcagaaaataattacatggttggaaaatgtgggacaaaagaggtgtgagtcatcagacaaggatatacttcaaggggtgcaacaaaggctatgattactatctgtcttacctcattcaagtctgtttatcgtagaggaattacaaggactctgcaagggactgacatgctaagtgttcaatagctattgactctatagtgccacttatgaagcatattgaactagataactagatgtttctcttttctcatatgttggagcttccctaacttttttttttttttttttttttgagaccgagtctcgctctgtcgcccaggctggagtgcggtggcgcgatctcggctcactgcaagctccgcctcccgggttcacgccattctcctgcctcagcctcccgagtagctgggactacaagtgcccgccaccgcgcccggctaattttttttatttttagtagagatggggtttcaccttgttagccaggatggtctcgatctcctgaccttgcgatccgtctgcctcggccacccaaagtgctgggattacaggtgtgagcaaccgcgcccggcctgagcttggctaacttttgatgctctctcatcctgcttatgactgaggaaatggatgatttataacaggggaaatgggtaatttttttagaacttaattttcttaactattttaagtacgagggactgaacacctttatcactgcagtgccagtgcagaggaatcatagtcagcttctctaaatacagggttttcctctgtaaaactacctaccagttggccagagtatgatcagaaatgacacggtagttggcaaaacagcctcttcactatccatatgtgttgcccgatctcttaagtcattttaaggttcagtcaagagtcaaggcaagaattttaaagaagttatgagactaagacctattattaatttaacaggaaatatttttagtagatttagaaaactggcctggaaaaatgtgactcagttttaaatggattcaaattgtgatttcgcttaggaaaattttgtttcaagaatggctcaaataaaggttaaaaaactacttttcacaagaagaacattttatatagttttgttgttgttgtgctataatatataaaggcatcatcttaatattttcttggtcattgcaaatcctaaagaacataaaaaatttctggaagaatgtggggaaaatagcaacacagatttctcagcaatatttttttaaaatcttaatgaggaatgtagttttcagtttttcacaatatccagttagcttataactagcaataaccgttgttctgatactcatttagtttaacattcagtgttatagcttcattttatagttgaggttaagtgcacacatcttgagaaaaaaaatacagaaaatacagctaatacactgatttttttttttgcaaagcaaatatcttgccttgctttctctcttaaacacactgaagttctagaagagatttgaaagcattttattccattcataggagatcaaaaataaaagagagttataccttttggaaatgtaatgaagcactacgttgttcattgttccagtatgttgaaatacttaagtagcttttaataattataaacaattagacatttttttttgtttttcatttaacacttctgagatggctgatatttagaaaatacatgctaggaatgatcctatgcaatttcaggtatttctctgatagataactcagtccataacctagtaacactcagtctaatacattgaggtagaagaaataagaaaacagctcaatagagcaagataataatagatttagccttggatttccagcctaatttttggaaacagatgctctagcatatttttgtgtgttttttcccatgccaagctgatcatagcccctaatggtatgacacataaagcacttaaaatacaaacacattgtaaccctaaatggaagaaggggatctgatgaaaacaatcattgtttagatgtttctcagaaaaagagcttaacatttttttcaaaatatattgctattgcttcactagcaaagaaggtgctaaaaatgacaactgcaaaattttcttgaacattctgtatcataaaacacaatcatttttccactctcaactttttaggaactaaaacaaagatccttgccatcagttagaataacaggaaatagcagtgcttacagacagatggctcaataaccttcctaatgaaggtcgtcttctccttctggatccttccctggactgactcaatagaaagcaaaacaattttcacaagattacaatatccacacaataaaatttccaacaaagaactccaaacctttgacagatatttaataatatagtttaagtttaagttctgactatcattccactaataccacactgatacaggcaaccattgcctcacatattgatcatcataataggcttcaggcattttctcactccaaaatattgtttaaattatttttgactaattttcattaaatattgtattcaatacataatttctttatgttcttgatatggttaaggtctgtatctccacccagttctcatcttgaattgtctcccgtaaatctcatgtgttgttggagagaccccgtgggagatcattgaatcatgggggcagtttttccatactgttctcatgatagtgaataagtctcacgagatctgatggtttcaccaggggtttctgcttttgcatcttcctcattctctctttgcctgctgccatccatgtaagacagaactcgctccccacagtaaattggtgccagaagtggggtgttgcttaaaagataaccaaaaatgtggaagcgactttggaactgagtaacacgcagaggttggaacagtttggagggctcagaagaagacagaaaaatatgggaaagtttgaaatttcctagagacttgttgaatggcttttctcaaaattgctgatagcaatgtggacaataaggttgaggctgaggtggtctcagatggagatgagaaaattgttgggagctagagcaaaggtgactcttgttttagctaagagacttgtggcattttattcctgccctagagatctgtggaactttgaacttgagagagacgatttagggtacctggcagaagaaatttctaagcagcaaagcattcaagaggtgactggtgtgctgttaaaggcattccattttattagagaggaaacataaaagttcagaaaatttacagcctgatcatgtgatagaaaagtaaatctctcttactgaggagaaatttaagccaactgcagaaatttgcacaagtaacgaggagccaaatgttaatccccaagacaatgagaaaaatgtctttagggcatgtcagaggtcttcacacatatcattatataataataaggggatcaattcagcatgagaatacaacaattgtaaatatgtatccatccaacactggagtacccagattcataaagcaaatattattagatcaaaaagagagatcaaatgcaatacagtaatagtggggaacttcaacatcccactctcagcattaggcagatcatttagatagaaaatcaacaaagaaacacgggatttaaattggacttcagaccaaatggatttaacagacaattacagaacattctatacaagtactgaatacacattcttcttgtcagcacatggagcattatccaggataggccatatattaaaccacaaaacaaggctcaacaaatttaaaaaaaaaaagaaataatatcaagtacttctcagacctcaatgaaataaaaactaaaaatccatatcaagaaaaactttggaaattacacaaatacgagaacattaaacaacatgctcctgaataaccactgggtcaattgataagacggaaaccagaaaaaaattattttaacaaatgaaactgaaaacacaacatacaaaaacctgcataatacagcaaaagtagtggtaagtgagacatttataacaataaacacccatatcagaaaatttaaagattacaaacaaacactctaacagcacaccttaagaaaagtaagaacaaaccaaatcccgaattagtcaaagcaaaggaataataaagatcagagcagaaataaatgtaataaagactaataaacccctccaacgatacaatgaaaaattgtttctttgaaaagaaaacaaatcgataaaccactacttagactaaccaagaaaagatgagagacgacccaaataaacaaaatcagcaatgcacaaggagacaacacaactgataccaaaaaaatacaaaagattattgagaccattatgaaaaactatatgcttataacctggaaaacctagaagaaatggataaattcctggaaacataccccatgacaagattgaatctggaagaaacagaaaacctgaacagaccaataatgagtaatgagattgaatcagtaataaaaagtctcccaacaacaagaaaaaagcccaggactgaaggaattcatagctaaattctactgaatgtgcaaagaaaaatgaataccaatgctcctgaaactattccaaaaaattggagaggaggaaatcctccctaagtcattctataatgccagaatcaccctgatgtcaaaccagacacaggcacaacataaaaagaaacctacagcccagtattcctaaacacagatgcaaaagtgctcaacaaaatgctagtaaactgaatccaatagcatatcaaaaagataatacaccataaccaaatgggatttataccagggctgcaagggtgtttcaacatatgcaaagcaacaaaggtgatgcatcgcaccaacagaatggaagataaaaaatatctaatcatcacaatagttgcagaagaaaggttgttctaaaattgaacatctcttcatggtgaaaacctcaataaactagtcatggaaggaacacatctcaaaataataaaggctgtctacaacaaaccggcagctaacatcacactgaatagggaaaagttgagatctttcctctaagaactggaacaagatgaggatgctgctttcaccactcctgtttgacacagtactggaagttctagccagagcactcaggcaagagaaggagatgaaaacgtgaaaattgggaaaaaacagtcaaatcatgcctctttggtgataatatgatcttatatatagcacaatctaaagactccaaaaagaaactcttagatttgataaatatcagtaagttgtagaatacaaattcaatttacaagataggtagtattttatgcaccaataataatctatttgggaaagaaagtaggaaggcaatttcatttatagaactacaaataaaatacctatgaataaatttaaccaaagagatgaaaaatctttacaagaactataaaacagggatcaaataaattgaagatgacaaaaacaaaaggaaaagcatgaaatgctcatggatcaaaagaattaatataattaaaatgattatgttgccccaaatgatctacagattcaatgcaatctctatcaaaatgccaatgtcattcttcactgaattagcaaaaactatcctaaacttcatttggtaccccaaaactgcttgaatagccaaagcaacacctatcaaaagagcaaaactggaggcatcacattatctgacttcaaaatatattacaaagctaaagtagcaaaaactgcctgatacaaaacttatcagtctactaaaaaagagctgtctcttctctttcttaaggccagtaattttacttatgccatgttctcaatcactaatcttttcagctataaatcatcacatttatcttttaatattcatcctttctgcaagtgaagaactttcactaatagaaaataaaatccctacttctagactgcagggttttgaaagaaatatagtcttccctagagtctttggttttggtttgcatctgagtattaaatatttccaaaaaatatcccaaccagatttatttgatgagcataagacaacatatcgagtggcttattgaagtaatctgcacttgcatgactcagacacttccaaaaccagaccaataattttcattcaaagccttatcctctctcagagaatgttaacactattacagcagaaatctagaagccatctgtgactatcttcttgtcctttacctcccaaagaatgtggatgataaaatctagtcattttttaacttctaaataccatttaaagctgtctgcttcacttctatctccatcctgcttccactcatttctccataaattctaatcaggtttttgcttgccacattcaaaaaaacctctcatcaattactgtcatgtttcttagtggatgaaaatgaccttctttctcttatttgaccttccagcagattcagtaattccttctttaataatcctcttctttagaaatactctcccttattggattacacggcataactaccttccattcattatttttctatcccattttctggctcatcaatcttaattgaactattaaatatttgagtttcatgaggctctgtcatagacatccttgtcttctttttctcagcgtgtggccgtattaatgcttgaagcttccatctctgcattcatgtcttctctgccatcctagcttaattttaccaaccttcctgtttaagtcccatatttaatgttctcatactctatgtagctttccttcattgctcttatccctggcttaattcacacataattatgttactcttttttcaatttctttctctataattgcccccttagacataagatcaaaaataacatttttaattttaatttacttctattgtcttacttgtcatatggaggtgattaatagatatttggtcaatgaacaaattatgattagaatgactccattattacaattttgtggcaccattttgagaataaatgatgactcaaatatgtctgaaactattttcacaatttcaccccaatcctggtcttctcccagtgttccctcactcagtgaacgttatcagcaacaaggtagaaaggaagtcttttcttactttcgttatgtctagagaatgattcagtagttattcagcagtatattttattcctttttagacatgccaattttgcgtttctgtttatgaaccaagctttactataactggtctatttttttcagatttaataaccaatgaaaatcgtcacaacagactcatttgagatgttttctgatcttaaaaattaaagacataaactgaataattataatactactgtatggtttgctcaataagaatctgtctgctttaaagcaaacaagcaaacaaaaacctatactttcctctttttctccatagggaagcatactgattgcaatctttgagtcttatttgaaaactaaattcagtgagctttttcctccaaggctgagagaaaaggatcattttcttgtgacactaagagaatttaactggcacattaagccttccactcaattcagtgattctcctcttatatttagattctgtatgagaatatgccctatatgcatttatgatagaatatcatatgatattttcattttaaagcaccttccatctgttaaatcattcagcctctggaagttttaatgaatcaaatatcacattagcatcctgaatgtgtatattttatacagaagtaaattcatttctatttgatgctgagagagatattctgtcagaacatttctttccaaagacagtttctttcttttttattcttaaaacttcactatatgaaatataaaattatttaataagtcttgtcatgtcatagcgtagtaacacaatacaggactgatggcaaacaacggatattctgtagccattcagaaaaaaaaaacaacaaaagatacaatttaactccttttaaaatgcagtcacttaagataatggcattaatcaatatattaccccctgacaaaataaaatttactcaaagaaaaattatgtgacaattttttaaatcaagttctgacttgataatttattgtgttatacaccattgaaaacttctataataaagcacacagattttaatttaagatgtagcacattattaaatactattttaagtataatactcggtttattattctatgactacatatgatttcctgaaatcaaattggttagattatcactaatatagtttgaaatataaatgacagctaagcatactaagaactacgtggccaataagagtttaaaagcacatagacaataagcctgcccatcttgaattattttgataatttattttcaataataccatactgacttatataagttgaattgtgtactcctcaaaagatatattgatgtccctactcccagtacctcagaatgtgaccttatttgaaaatagagtccttacagaggtgatcagttgaagtgaatttgtactaaaaagaatggggtgagcacctaatcttatacgactggtgtccttataaagatatgaatatgtgaagacacagagacactggaagaatgacatgcaagaacggaggcagagattggagtaaggcatctacaagccaaggaatgccaaggaatgctggctgtcaccagaagctaagagagaggcatgcaacagattctctttccaaattctcagaaggaaccaactcgctgataccttgatattgaacttctagcctccggaactgtgagacaataaatttatgttgctttaagccatccatcatgtagtactcataccctctttttttttttttttttttttttttttttggtgggggggcggagtctcgctctgtcgcccaggctggagtgcagtggcaccgtctcggctcactgcaagctccgcctcccgggttcacgccattctcctgcctcagcttccagagtagctgggactacaggcgcccgccaccacgcccggctaattttttgtattcttagtagagacggggtttcaccgtgttagccaggatggtctcaatctcctgacctcatgatccaccagccttggcctcccaaagtgctgagattacaggcgtgagccaccagcacctggcccagaccatgaagcagtttttgtttgctgaatatatcacttctgttacttttagagcctatttctataccttgaaataaatgttcactcaagaaaataagacatattataaggtaagactctttatcattataaataaatcataggcaaccagaattatccaaatcagtagctgtacataggactctacaataatcaagtgtcataaatcattctgaagagtgaagaataaatttcttgctagatggtttacatgctgttttgctgtttatgtattgtgtggtgtgtctttataatatcataggcaatacacatatagaataaacactttcataattaaaaataatagaaattctggccgagcccggtggctcactgcctgtaatcccagcactttgggaggccgaggccagtggatcactgaggtcaagagatcgagaccatcctggccaacatggtgaaattccgtctctactaaaaaaaatacaaaaattagctgggtgtggtggcgcatccctgtagtcccagctacttgggaggctgaggcaggggaatcccttgaacagggaggcggaggttgcagtgagccaagatcacgccactacactccagcctggctacagagtgagactgtctcaaataataataataataataacaacaacaacaacagaaattctaatgttcatctaattaataagtgaccaatttaaaaatatacattaatgcaaaacgcatttatgtgaagcaagacaaagcctgtaaacacattttttattagttagaagtgtggcggccaggcgcggtggctcatgcctgtaatcccagcactgtgggaggccgaggcgggcggatcaggaggtgaagagatcaagacatggtgaaaccctatctctactaaaaatgcaaaaaaaaaaattagctgtgtgtggtggcaggcgcctgtagtccctcccagctactcgggagactgaggcaggagaattgcttgaacccaggaggtggaggttgcagtgagccgggatcatgccactgtattccagcctgagcaacagagcaagactctgtctcaaaaaaaaaaaaaaaaaaaaaaggtgtggcagaaatgttggttggacgatagctgggagtcatctatggtccctaggaattattaattagtctaatctagtaaagccttcaaatactccttgacatacttctattatttaaaaacacagtttatatatttacttctttattaaaaatatattaatgcctgtggtgacatgtattgggcaaattaactcaaaatttagagactaattcctctaactcaataattttcccagtagcacagataatacatgatttaccattgtgtaatgaaagttcatctcaaaacaccaacattatcactctaacgccactgctgtctaattagagcacaacctgcattgttattgctttaactgaaaatcaatttctcaatcattgaattacataaagccctgagagggatcatacttattatctctgtcttcaatttgctagactttcctgggctgtcagtacatctagatttagagtaaatgttaaatgcagtagttaatctttaaactgtaaggagatctggctgctgagataccatcagacataattcctttttcctatcaccattgttttaaagtggggaaggggagtaattattggttggtgtagagccaatttgtctttattttgacaaaagaaatgaaagcagagtttctatatcactgtcgtaatgtaaatatatgaacaaaatagtaaaggtctaatgaattttcaaaatactatgtgtaaacctccttccttatgatggacagcacaccaaggcagatacggaatttccagttgatttactgtgggccaccttttggtccatgtttcacccaaccaatgaaactattagagcattttctaactccctgagatacaatgttcaatctagaatctgcttatggtcccacgtcagtttcatcctgatccaaatttatgccccttccatcattgcctcaaacccttcatatccattcccatacatattctccagatatgtgtcttcattaattaaaattatcaaatatttcttttggagtgcagcactcttccttcataactcacacttcgtaacttacctttaggggtctgctgagatttgagtatacctaaggatctataggtcatctttaggagccttaactcgagactcaagttaagttacaggtctaaaagtggtaggagtggggcacgaagaaaatcagcaccatcttgctaggtaattgcctcagaagagaccattacaaggctacttctcctggcaaagctgactcatcagaatttaggggctcgatgcccacaattttatcaaaatatacccatgcgcctccattgcaatttgaattatcccattccttcccaatcagagccttcactttagtagtagacatcctttgtggttgggaatttgtgttgtaattaagccacttgcagactgagattctaggtttgtttttcagcaacttcagctgcggctacaggagataagaaaaattttcacggcagacagagacattttcaagtcatatatgctgtgcttgaactgaaaatttgaattcctgaactcatctttttcttttgccactttattgagtgacattaagaccagctatccaacctcattatacttattaatttggcaaacgtatcgtatacaaacatagaatctgacctcttttttatatttgattttgggtatccaatggttaaattttttgcatttctaatggctgttgctacatcacactacgggccattggtactctctttactactggaaatacagtcattggtgccattcaatctaatcaggtagagaagcaatttggaaaccccagaagtaatctagaaaactcatccttcagattctgtttctctagaaccactctcagtactgaaatttacatatctatattagtcagtaaggattctccagaaaaataaaaccaaaagctgggtgtgtgtgcgtgtgtgtgtgcgtgtgcatgtgcacatgtgtgtgcagagagagagagacagacagatgttaaagtattggctttcatatgtgtgcaggcttgacaagtgtaaaatttgcagggtagactgtcagactggagactcagaaaagagttatgttttgagtcccaaagaagttgcttggcagaatttctccttgcttaaaaaggtcagatttttctattaagaccttcaactgattggatgaggcccactcacattgtggaggataatctgtactcaaaatctaatgatttaaacattgatcacattttaaaatatctgcgtgaaaacatctagaataatgtttgacaaaacacctgtgtataccatgacctaggcatgttgatgcataaaattaagcataacatcagcttgtagtgctttgttgatcctttctcatatcatcatgatcgtcttatccatgaacttatttctttctgtcaaaaaattaattcagctttctcaatctcttgggaattttctttctttgcttcaagaacatctcatttgggttaatgttcctaaataaattaatttccaaacttataaaatatataatctactttcacagcgtctaatttctcatgacatggtcatttctctttcagttgcagtttagcttttatcccaaatcagtgccgacattgttttcccaggtatagaatgtgatctatgcgacaaaagaaagaccatttttggtatttatttgcatttattctctctacagaactgccattgttagtgttttcctgtttttcacatttcattttatttttaacttttatagccacctagtaggcttatatgtttatggggttcatgagatattttgacacaaacataaaattttgtttgtttttaaatctgttctcttccttggcaccgtattattttcctctcctttccctgtgttattcaggataagctagctattatatagtaataagcaaacctagaaatatacacaatgacttttctttcagaaacatgttaatgctagttgggcagctctctatagcagttctccattgtggaaaaactcagagatccatgttactttcatgttaggctctgtcattttaacaaatgacctcaatagtcatcaccaaagagaaagtaaaaaatggaggaggtgcactgatctgtattggagagtcatgtgacacttctgcttgtaatctgttggttagaaatggtcacttcaagggttttgcaagggagtttgagaaggataagccacggtataagaatattctggtaactaaatagtccctttgcttcatccttcaaaataaaacctgctcagttatgccccaaaatatatataaataggagttccatttagtcattagcatcacttgcaaattcagaatttttgagaattcagttgcttcagctccttcgtcaagtctaactatagctcctctttttctggaaagctatgccctaaacaactctctcatacccaatttttaatgatgaaagagggatcaggttatcataataagcaccactaattaaagaaaataaagtgaagaatgagaaatacaatcttctcttgtctgtagtatttcaaaaatcctattgaataaacattgtgaagccttttatcatagaggtgaggaaatttccttgagcatcagagtctcctccaatgggacaactctcttacctgaatctctggggccattagtttgttctccaggaagctttcctcatttcattatttttggctacttctgaagtgatcattgggaaataagcccctctttacctttaagtattgcagtataataaaatattataagaattagtgtatccaaaaaactccacaatttatcattactatttaaaagaaataaaaatttacattccaatcttaacgttttggccaagtcattttgattagctgactattatagtgcatgtgtttctcaaagacttttgaaactccaaatattaatgcttggagaatagaatcaattggtttttccaacatacaaaagattctaattcctgagctgtgtcaatttcctttcactgctctttgcaaataagcaccgtgatgcataaatacatgtctttctgataacattttgccaaacaaagttaaaattatacagaaatatacaccaatatcttattttacatcctcctcccccagagctgcaactcattagatcacctttttaattgtcttaggtgatagattataaataattatctactgcataaagtggttgttcacctgtacagcttttggtatcagttttctccccatcctctgtctgtctacatagccaacaccagatattttaggttctgttatactcgcataacatttcccctactgatattcagagaagataatttggagaatgctcaacaattatttgcttcaagctgtaagtgagttacacattcccatttttgagaactactacctaactgaggaaacttgagagtttattcattctacatgagaagaaagaaaatccagtgcagaaaacaacattatctttactgactctacaattttattttttatctaatttcccttagataatctctatgctgaatatttttcaaaaatattatattgacaattttgtactatatcttgtctcttcatatactttcctttcaagtgaaggtaacatttactatacacatagtatagacatatgtcatttactttacatccattgtaaatgatcataatcatggatattataactctcctaccacagatctttacctaattatataaaatagaaactctattatattaataaagaagggagacaatttgttcaaactcacaaaaactgtgtatgctaagggcagaattaaaagccagctttgtctgattcatacataaatgctctgtgcattacatgatgctgctttaaatatgcccatttcagctgggacgatggctcacatctgtaatcccagcactttgggaggctgaggcaggcggatcgcctgaagtcaggagtttgagaccagtctggcctacattgtgaaaccacgcctctaataaaaatacaaaaaaattactcgggtgtggtggcaggcgcctgcaatcccagctccttgggaggctgaggcaggagaatcgtttgaacccgggaggcggaggttgcagtgagccaagattgcaccattgcgctccagcctgggtgacaagagtgagactctgtctcaaaaaaaaacaacaacaaataatgcccatttctatgtcttcatctcttgcattaatagagtctcaatctacacaatgagctcatatttttctccaaactttataaccacaatcctaaactggctcatcagcctgccataattctaagtcacttgatgatctcaacctcagcatgtttccaacccaagtatactgctttcactttttttcaaagaacgtctcctttactctgcctttaatcacacaagcccagagccctagacattttggtggcccctggaaaaaggaaggtggattattacaatcagaattacaacaaaactcatccaggatgaaatgtgaaaataaattctgacatgcaattgcatcaagggtcaagcatatgtgctggagataccagccacagcaagcaggttatacagtaagtgatagaaagcagagccttgaaagtctgtgttctgccctggagtttagcagctgcagaagctacagaaggatatttggcctgagttttaagagaagaagagtctactgagctggcccaggtgctgattcctttatttcagttaaaggcactaacaaattctttttgttactcaggattatattcttagaattgattcagatccttaaatctctcttgttttccagaaccaatcatgcagttcacatgcaattctacttctgttaggattttgttatctctcttatattcggcgttactttttcaccctggctcagatatgtcattatgtttacttgacttattgcaataaccttttcgttgatctttagtttatttgttcaataattgttaattttctgttttacagccttccctgctcccaatttttttccctcggtagcaaacacatcttataaactttaagctggaatccaaggaactttatgcttatgcttataaataaagcaggtacttgtaccccaatcctttttaatgaaagataaagatggggcatcatgagttcccaggaaaattaccctttaaatgtgtgcacacacagatacaaacatacaaaacaaatcgttattttcttcttcattggaagtggttaattgtgtttgtatatagcacttgggggtagtttaaataagctctgtctctcagaagaatttgctgacaaaaagaggatgacagaacaaaaatgggaaaaactcctacatgtttgataatgatgaacgactgaatcaactctggaaacttttgccttcctaatcttctaaaagtatacataattaattttcttatttgtgaagccaccagtggctaggtgttctgtttcttgtatcagaaagtgctataatcaatgaatccatgagtcttctgaatttattttacctttcacagtcaggctggtcagtggtgctcagacttaacacacacattttcacttttcctactcctgcgatgacaggccattccacatatgacttagccaaaatcatttccatgctccaagattcactttaaacaaagtacattattagcaagcttctctttattggcctatcctgatgtgtcttttttttctattttacatatgctattttcaaggcacatttgattatatatttcataatacagtaattgccaaagtgtgtttaacatatgatttcctcaggatcccttccctttctgaattccaaatggaagaacagaaagtgcaatgcaaagaatgatgatccatattttatttttggcaagcttgtagaagcactattgtaaatgtaaaaggaaaaagaactgtaacctagaaacttcttcagtatatgagacaccattcaggactgctgctgtttgagtgttttcttctttaaggtactaattttttctcctcctggagtacgttgtagcttagaaatttcatccccagaagcacgagtttcaccattcattgctgttctgaaggaccatgccctcctttgattaaaatcccacacattcagaattttgaattcctgagacatctgtcagtgtgggcagaatgcagtttgaagttttcacagacatgagtttgcaatgttactatccttcttaggagtgtatgattttaagagatttatttagtctttctactctcagattgctgattttaaaaaatgggcataacatcaacttttctgctggtttcttataaggattaaatcccaattctgcctttacaagctgtgcaattttaagaaaatccaactaaaatttctaccttataaaatgtggataatagtacttacccaataccacttgtccctgattaaatggtttaacacaggtaaaagacttagagtaatgtttgacacataggcaacactgtctataattttgctattaacaatagtatattgcctgacacttaatatgtccttgataaattgtaactattattatgaattcaattatgtctttattatttatctttttaacatgtttatttgtttacttacctagaaaacatttctttttttcaccataaataccttgaatttagaagctatcatacaaactgttgtgtcatgtagaccccagaactatgcccatagaaagatctcagtagatatttattttattttattttattttatttttttttttttttgagacggagtctcgctctgtcacccaggctgtagtgcagtggcgagatctcagctcactgcaagctctgcctcccgggttcacgccattctcctgcttcagcctcccgagtagctgggactacaggcgcccgccaccaagcccggctaattttttgtatttttagtagagacggggtttcaccgtgttagccaggatggtctcgatctcctgacctcgtgatcagcccgcctcggcctcccaaagtgctggaattacaggcgtgagccatcagtagttattttaaaattaattttatttctcaagcagtatctaagacaaagtgaaatataattctaagaataaatctttaagatttatggtttctcatattaagataaatgaaagccatcattgaagtgtttacaaacataacaacaaaattgactcaatataattttccattgataaatgattggccaaataaatcatggtacatttaccaaaaaaacacaaaacagttattaagtggaaaagtgctttaaaatacaggttttatcataagttaagtacagcaaggccaacagatcagaagatgattgttattgaaaagatagcttgtggccaggcgcagtggctcacatttgtaaccccagcactttgggaggccggggcgggaaaatgacgaggtcaggagttcaagaccagcctggccaatatggtgaaaccccatctctaataaaaacacaaaaaattaactgggcatagtggcaggcgcctgtaatcccagctactcgggaggctgaggcaggagaatcccttgaacccaggaggcggatgttgttgcagtgagccaagatcttaccactgcactccagccctggtgacagagcgagactctgtctcaaaacaaataaataaataaataaataagaaaaagaaaagaaaagaaaagatagcatgctatactcacagattttcaagaggaggggcatgtcgtgacactgcggatcacagggaaaagcatcagagtcagtcagaggcaggggaagtgagggaaaaacatggttgagagttttcattaaccaaaacatcaaagctgtttttgaatggctatcacagtagagtgcagtggccttggatgcccactgtcagttccctgcaggcgagctttgccactgaccagctctgccagtggtttgagaaaattcacttctgtattagtttatttagctgtaaacaaaaaaagtaacatatatcacagaattctgatagagattaaatggtatgaattacataagcttcaaagaatattatatatatgtgtgtctatatatatatgcatatatatgtgcatatgactgtgtgttaaaagtatactactttagtgtgtgaaaaagtataaacgtgtatatatataagaacatctatacttttttaacacttacctgtctgcaccactaatctttaagtaccatgcaactgggtctgtttttgttcaccattgtatttccatctcccagtgcagtgcttggtgaatagaaggctaccaatgacaacaacaacagcagcaagacaaaaacaagagtctttattgtagtgcccatgggaaggagtggatgagttagtgtaggcaggtttaagattggctagttcaaataatttccacatagtctgtggcatcgtggctgtctctggttatcctgatacctggtcctaggatgattagtgtagggaacagtggtcctgagtgtgaaagcttgataaagggagtgtttacagatatgagctctgaactggttgctttgtgtataaaagccattcttgcagacagtttgtacgcttagctcctggaattagctcacactggaaggggcagttccttcagagtcaccaaggcccctagatgtcaaagtattcaacatagaaactagaaaatgtggatatgatttttaaaaggcaaatctgtatggcatgggaagaagtccatggaaggttataatgcactattttataagaataaggtcaaaataccattgatctgtggttgatctatatttttctactgggatgctgagaaacatagtactgaccctgcgagatagagatgaagtgtattagcttgtgatttatgatgtcatgttcagagtccaaaattcaccttttgtaccagcttgcttacattgtttattaaatgtgaatagatggtggtgtgcatctggtttcagctgagtgaccagtgagatataaatgagtcaggcaaacttccaccttagctcacctgggactaaagcatctcacatctattttggtaattcacagtcaggagatggagcacctgctgtgtggctgggaaagggctctgagagctatgcatggacttctctgatattttcttatgctttcttctcctgctgtactatctatcttcattaaagcctcgtatgactgacccctgtggagtctcctgaggcttctcaattatctgacctctagtaattgccataacaatatataatatcagcccttttacttgtgaaatgtaaatgcttgtgtgtctataagaattaaatacaaataaaattgatacagtttttattagtttagtgatataataattaaagtaagagttaatatactaacaataatattttggtctttctcagatcctagtggaagatataataaaatcaaaagctacatagtataattattaccattttaattggtaatttaatataataaacatctaagtgtatagagcttatgtttaatagagttcagttatgtaattgagtaattattgaattgaataattatctaaataatcaaattggatgagttaagacatttaaatcctttggacatagctacctactctatgctagttttcttacatctggatagattctcttacaataacctagaatacatttactaagaccacatggataacagttaaatccattttaaacagaatgatttcaaaaaaggctattcctatctggacttgattttcctatttgttctagttgaggtagattaggggaaagctgcatgtctcgtttcccttaagaactaagaaagtcatggactcagagttacagagagctaattgtagtttactttacctatgtacctcaccagactcactacacaagccatagtggtactagcacacatgtgtattacagtttcacacaatatgaagcacttttccccacttactattatggtggcctgtgaaataggttataaaactattaattatcttctccaaattgtgcatgatgctattccaaagcttcatagtttgcagtgtggtctacatttactctttgaaagcatattcaacaactgacttttcctcttcataaaatgaaaatatactgctggatagaactatatgtcattcatatttctatctgtggcccttataatcatttgtataaatatgtattcaataaatgataaataaattcaattgatcctaattaccatttatatcactaaataatctgcccttaccttagggtgcatgtaagaaggtagaattcataggaaaagtaaaatgcacagatacaaggtattctagctagtgaatgagcctctacaaaaaactaaaatttcttataatcatagcagaaagaatagaggagtatctgagtctgcaaaactacgatgctattttatggtcaaagaaaaatatgtagtttatatacaatcaggtttcatatttttttacgacagatcaaatgagtaaaagatcatatgtgtcaagtgactcagtggtcacatgtcaagttatcagtggaagagtattaaaactcaacactgtggaccagatattttctagttctctatttccaaagtttctgccagtttcctatcttatcatgcaccaagaaagaagaagcatcttagaggcaggtgtgcataggcctgtaggacatacgatatacatatggtcattctcatggcactcggttgccttcgctctatcacgtattcttgtgtgtagaaatcatatgtgtggcaaaagtgatgctcatgctcttatttcactgctcggagcaggcaatacatatttcatgtaactatgaaaaagatagaaaggctcaggaaacataatttatctcttcattggctaaatgtagctagcataagcagtagaaatgtagatcttgatttggaatatgagaattcagcggaagagtgcacatatcctaattgttactagaatcagtgctacatgagctgagcaaattagatccatgtagaaaggaagaaaaatatggaaaaccctgtagcaacaaggtaattttagtatagatcatccaagaccattagattcagtctgcacctgcactataggtcaaagggtctataattgctgcaagctctctctatgggaatgtttttccagcacagggaaaggcaatggtttgtctccagtaaagtgtgtacaagatcattgtgaccatcatggttctgagagctgatgaataaatgggtgaacagaaacaacattccttcatgcaggactccaaaaaaatggatttccctctaagaaccttttgtttcgaaaggatttcaatgccttgcttctgcttaattaccctttgcagcctttacctctgctgccagagtttgcaccctgtatgctgctttccaagatattgttgccaaggatgctcctattcctatttttatgccttggctccttgaaaaccttcctggcaatagcccaagggcacagatatgccctgtcacaatggtggcaagttttttaaatgcctttccccgagtgactttcctttgatatggtgcaagcaatggagttctcacatatagttccaagtggatacagttccaatccaaagggttgtttcgtttttattgaattaggaatctcttcccctcaaatttttggcccaagtggatcatttgactttaatttataccattgtgttctccatatatatatatggagaatatatatatatatacacatatatatggagtatatatatatacacatacatatggagaatatatatatatatggagaatatatatacacatatatatggagaatatatatatatctggataatatatatctatatggagaatatatatatggagaatatatatatggagaacatatatatatatggtgaatacatatatatggagaatatatatatataatatatgcacatttagaatttcctagagactgcctccaaaaatgtaattatgtttacactacttttggagaagctatcaaatgctatctactatacctattttttttataaataggcacatttgcacaaaatatatttgaccaatgtttgagctatttcatttctctgcttaaagaaaataatagttaatatgatttgaagtctatttttctaaacactctgcttatgggtaatcacccaggaccttcaatttccaaattaccttatccttactttgacatgtatatgtgacttttgttcaatctcattattccatttatacacttctataacatttttgttataaaaatcaaaatgtaaactagtaggatattacgtaattatgaggtacgtcctaagtactttgttgctaatgacaacacacttgtgccaaagaccaccagaaatactcctgtcattgaacaaattgggtttatttctcattgcaacaatggagactgcacataatgtggaatgatggagtattccactaagagcatgttataagaaacttaaggctgggcacggtggctcacgcctgtaatcccaggactttgggaggccaaggtgggtggatcacctgaggttgggagttcgagaccagcctgaccaacatggggaaactccgtctctactaaaaatacaaaattagccagtgtggtggcacatgcctgtaatcccagctactctggaggctgaggcagaagaatctcttgaacctgggaggcggaggttgcagtgagccgagattgcaccattgcattccaacctggtcatcaagagcgaaactccatccaaaaaaaaaaaaaaaaaaattggattttatctctttttatctctagttaggtgatttgagaagaatttcagaaagaatggctgtactgtctattgcatggtgacaggaagcaggaataattttatgattaattatctttaccttatctaaaaagaagagatgacaaaagcaaagctaaacctgtcattgcaaatagcacccatttatactggctagaggaaaagagatatggggaattttttgttgtttgatgcttcataatttttctatattcagacaggactatgaggtagccttgtttctgtcttaatcaattagcaacaggatgatcttgtttgatattaatgttttgtaaacttatttgtgtttaacaagagaacatgaaggcctcaatgatattgttgagacagctcccagatgtttcggatcaatttgttctctcttagtaacaataggctccttgcagttttaaaaagagctttattggtatataatatatgtaaaataagctattatacttaaaatgtacaattggatatttcaacataagtatatgcctataaccatcaccacaatcaaaatagtaatctaaccagccttccctaagcctttcctcctgcccctttgaaaacttctctccatgatccttcctattccccaccccatccccaggcagctattgatctattttatgtcacttcactagaattgaatataaattgaatttcctagaattgaatctaaattgaatcacacaatatgttctccctttctggatgtgtgattgttagttttcttgcactcaatataattattttgagatacatctatacttttgcatgtctcaatacatcatttattttattccagagaagtaatctatcttaggtacataccatagcttttgtatccattcacctattgataggatttggagttgcctctaacttggggttgtttttaagtaaacctgcaataaatattcatgtacatgtcatgtctatacatatgctttcattttcctattcttcagaaaatacctaaaactgggatggttgggttatatggcattagtatgcttaacttttgaaaaagattgaactcttttctaaattaatagcagcactaaacattttcaccaataatgttttgtttctttcttcctttgcaatatataactgttattttttcccgtcttagagcactagctatgattttcaatatgaaaaatagaaatgaggagaaacggtactctactcttgccaggtacctgatcttggcatggatattggggaaaacccacagtttcttaatattaggtatggaactagctgtaggacttttaaaaatgttcttattcaagtttagaaattaccactaatagtttgctggaagttttcaatcacaaatggatgtcagattttgtcagataattttagttcatcagttaatataattacataatttatgttattttttcatgtatttctaaattggttttgctaaaattaacctgtgaaaccatacttacctggtgctttcattatgtaaagtcatttgttattgacttcatttatttcagcgaaacaggtttattcccatgatctttgtctcttcatgaaagttttggtatttgtgtagttcaagaaactggtacattttatcaaagttaccaaatcaatgtgtatagagttactcatattattattttattactttaatcaatgtttatgaggtctgaagtgatcacttctcttttatgtgttctatttgaaacttttgtcttctattttttcttagtctggttaaagttttatcaatcgtactaatcttttcaaaaaacaaggggattttttaaaaaaattatctgttgactgggtgtggtggctcatgcctgtaattccagcattttgggaggccgaggcaggcagatcacctgaggtcagcagttcaagaccagcctggccaacatggcaaaatcccgtctctactgaaaaatacaaaaaaaaaaaaaaaaaaaaaaattagctggttgtggtggtgttcacctgtagtcccagctactcaggaggctgatgcggactgtcacttgaacccaggaggcggaggttgcactgagccgagatcctgccactctactccagcctgggtgactgagcgagactctgtctctctctctctctttctctctctctctctttatatatatatataacctattaattttccatttccaatgtcactgacttttgctcaaatttttattatttaatttcttttgtttaagcttcagttgttctttcgttctctactttctcaaggaagaagctttagttactgattttttaccttcttttcttatatatgaacttaatgttacacatttcttctaagcattgcttttgctacatcccataaatgtttatatattgtgtttacattttcattttgtttaaaatatattattttaatttctctttaaacttatttaactcatttgttatttaaaactgtgtactttaattttcaaatatttagcaattttccagctatatttctgttactgatactaatttaattttattgtcatttgaggatattggggggtttctatattttaaatttgttaagctctgtttatagtctatcttggtaaatattttatgtgaacttgcaaagagtataaattctactgttgctggataaagtattctgtaaatgtcaattgtatcaaatcaatcaataacgatgctccagtcaactatattcttaccgattttctgcctgcgtgttttagcaatcactgaaaaggggatattgaagtcttcaatccaaatagaggatctgtcatttcttgctgtttttatcagatatttcctgatacagtttgacactctgctgtttgatgcatactaattaagaatcattatgctttcttagggaactgacccctttatcattgtgcaatgcccttctttatctctgacaattttagttagtctgagcttggctttatttgaaattaatagagaaagtccagccctagttttattagtgttcatatgctatatctttctccatctctttaattttaattatttacttttaaccaatctgactcatatttaaagttggttccttgtagatgtaatacagcatggtcattttaaaaatccactctgattaaatttctgtctgtgattaaatgtctgtgtcttctaattcaccaaatagaagggcacatatgtctttgttaataaacatagatactgataaaatgtctatgtcttctttattatttttttctttttttgacacagaatctcactgtgtcacccaggctggagtgcagtggtgtgatctcggctcactgccacctctgcctccccagttcaagcgatcctcctgcctcagcctcctgagtagctgggactacaggcacgtgccaccacacacagctaattttttgtatttttagtagagtcggggtttcgccatgttggccaggatggtcttgaactcctggcctcaagtgatctgcccacctaggcctcccaaagtgctgggattacaggcatgagccactgtgcctggccattaaatgtctatttcttctaattggtggatacagttgcactcatatccactatatactgtttcctattccttgcaggtgttcttttcttcttatttttcaattctttttgaaagtcttctgtggttttagttgaacattttatatgattctgttttatctcttctcttagcatatcaattatatttatttttaagttattttattatttcaatttactatttaatgttttaaaattttaatttacatataaatataatttgtattaaaattatattatttaaatggttgtccaagagtttcatataatgctacataatgcttcatgtgcagttcatatatcttaaaacaaagcatccccaattataatctcccatcttttatggtatgttagtcattcattttatttagctatatatgcttcaaccatccaatacatttttactattatgactttagcaaacacttacattttgatgtatctcagctcatctggctacaaagaaaaataaattttagatctcttaataataggagagatacaatagtttagtttcatttgcttcctcatcaatgttttttatttatgtagatctaagttactggtatttagcttcttccacctctctaagtaaattttttttactttatttgtagggaagatctggtggtgataaattatcttaatttttgtcagggaatgtcttctttttacctacgcttttgaggaatacattcagtagatatattactgtatgtttttatttagcacattacgtatttcacttgacaagattatattttttggatccttattctgctttgtgctcactaaacatttttgaacttatgattggtatctgttattatggtgcaaaattcataaccattaatgcctcaaataatttttatgatagcttctttttccttcttttccatttagaagtatgttacacatgtagctattgctccacaatttctgtatattctctttttttatttttaaaaattttagtccctgaaatttctattgacatctcttcatgtatctgattctttcactggctgtgttgagtatattgataagcccatctaagacagtcttcacttatattactgtgctttatgtttagattatatggggattattttagattatatggggattatcgtcaacctgcttacccatctgctcttgcatcttgtccatgtttttccattcaagccattaaaatagtaatcataactattttaaattccgtgattgataatgcaagcatctgtttcatatctgagtatggctgtgatgtttgcattgtccatttcagttgtgtttttttcttgtccttaggaatgctttgcaattatcttttgaaaattgggtgtgatgtatctggtaatagaaatgcatatataggctttcattgtaagcatttttaataacctggctaggtgttgggcaatgatcaatatatgttttaactatagtcatcaaagtcctaacatttgcctaatatccttggatttaattttttgtgttttttttgttgttgttttgtttgtttgttttctcctctcttgaatttggcatttttctgtgtacaactcagagtggtctgtcttgaaattctctcatttgtaatccactgaatctataatccacctaaaattaggtttctgaattgtatttaggtaaagttatttttcctgtatagcagcccattattataaagctgcgggtgtatttcacaattattattcttcccctccactctcagatcttataggggctctttcttggagactcaccttgtggtcctactggagtttctggaggcatagcgaattagtgaactccaaagattgtggccctaagattctctaactttcatactagtctacactagcaacttatcaaaattaccacttgaatgtttataccattttatgagtccagttatttctgctttaggtaagcatgtcttagatactgtagatgcacctgtctccagatgcaattgcagctttctaacagatctgaaaaaagttgttgattttatatatattttatttttgtatggacaggaatgacaaatgacaatttctttgttcattgaatgttagagctaaaacctcaatgttttataatattttatttgttccttcatgtattgagcctttatttgttgggtgttattttagctttatttttaaattcttttaaacttttttttctggaaaacatatgagttatttggacatagtttgatgctttctaattttgcttttaagatttgttggtcaggatagaacctcaaactagggctaattattttatactatgaggacaagactttcctgtgtaatctaacctgtttcattaatcttacaatttttcagtcaaactgatggcaatggtcactcttcttagccctgtgtgaccacaaggaccgttcaccataacgcttttggataactctttcaccagcttcaggtaatttatttgcatgcatgtggtgttcaagactcagatgaataatagagggtattcctccaaagatctctggagttcttactcacagcagatctttcctctccagtatcctgtatgacatattctagccatttttttctccctaaatactaagtaccatctcaactcaaaaagtttagaaattttacaggatctccttgggtttcccttccttatcacgtatgagaaaccatcaaggcagtaagctgggacttttcttttcgtttcttttttttattattgtttttgaaatataatttcaggatgacctcactcattgctttatgttcagtgtctttgaaagccttggtcagttttttttggttgtctcaggtgtgagggtaatttccatcttttgtgatttcatcttgatggggcacagatgttggagaaatgatgggtatttttttaaagctacaatttcgaagacaaattaaatcaatataagatacctgatactgatttctgatacctgagttgagactattatagcatttctattgaaggaaaaatgaatagttaaatacatttggttttatacatactaatgtaaacagatattcacacatatgtgttatgtatatatttgaatgttttaatacctatttaatatttacctaaaatattatatttttaagtaaaatccaactcaattttgtgagattctagtcaggctatccaataggcagctctgtcagaactgctagacactccattttcctggacacagtgcgtgatctgtcagtgagcacaaaatggtagttggatcaactggaagattcatagatagtagggctggttttcctcattccctagaattatgtaggcctggtgaactgggcactgtcttgaagaagattaagaaagaacccaattatcaataagaaccaggagaaggagaaggtgtgaatgatggagaaagaaccctgataacattatttaaaccactggatccatttaggatccactgtgcctaaaagcagtctaatttcttggactttttagatacataaggcaagaaaatgccttattttttctttaacctagtttacattgggtttcagtcactgcagtggcaacaacaataaaaatcttctaacacaattattcaattttctattggatagaaagatgcaaactttcctactgggaacactttcaaacagtttcggagaacttcagctattttttgcaaatatagaaactttgaaataaattttaccaggcagttttcatgtgggaattctccagaaggtgactatgtgaaaataaataggacatcaaaaaagcagtttttaagaagctatatcatacacattgtagaatacatcatgttttatgtactttaaaataattcagaactaatgaaatttaatgatgaataattgaataaaggcacatgtcaaaacattttagtggggatttatagcgtaataaacatttatttctgatgacaacttcaatttccttatccacatttctccatgactacgtttattttcaattccttgtcatcctgtttgatgacctatttttaatactttcaactgctgaaaacatttagaaaatagtatcaatgaaacattggccttctaatatgatatgtagcaaacgtttaagcttgatcatcacttattgcaaaagttcttgctggcgttttaagcaggtgaagagggaaatgaggacagagaatgcatatacataaggcgtgggaagccttcatcacacccacgtgtcttctgagccttcccaggtgatccaggtgagctcatttcttacacttcatttctccagcttgtaattaaatggattatgactcccagtggcttttgaatttaattacaaatgccatagccttgataattattacctggagaaataaaagctaaattataccacaagctttgtctttgcagtatctccatctttcttcatcactacacataaaagtctcatgcagagttttaacaacatgtttctaccactcaatttcgagtttctttgttctaagacatttaacaaaatatgctcatatttaaagcagaaactttaaccaaatcacaaaatgtctctcaataaggtataaatatcaagtatgtagtgatatgggctcttatccgttttctaatatcatgttgatgtagctgatggacatgcctaggatttactgcttgtttaaatcaagaagtttattcattgttttctactaagtttctacattgttttctactaagtttctacaaaatcaaatgaattacatcaactgatgaatttaatttaaaataaaattgggggcttcctgggctgttccaaatattcagtacccatacttctctacagacctgttcagctagaattccttcggccattggacagcgtcactttctctccccagttgcagtgttttgaaaaacataagagggaacctaagattaataagcttctagttctcatgatatttttattattctaaataagattaactttttcaaaagaggaaaaataattaaagaacaccagttacctagtagcatctttaatttctttcattcctttttttttttttttttttttgaaacggaatttctcccttgtcgcccaggctggagtgcaagggcgccatctcagctcactgcaacctttgcctcctgggttcaagcgattccctagcctcagcctccagagtagctagtattgattacagacactcaccaccacgtccagttaatttttgtgtctgtagtagagacggggtttcgccatgttggtcaggctggtctcgaacttctgacctcaggtgatccacccaattaggcctcccaaagtgctgagattacaagcgtgagccactatgcccagctcgcatctttaattcttacatcataaactactttaattttttagtgttttattctatagactcactatagaaagttgttcaattagtttgaatatatttggaattatactacgggacaggcatcatgctagaagttagatataacaccattgaagaaaaagtataaaccatcatgaagtttgccttctttttgaaagatagaaagcaaactatagtttgctaactagtgtcttatgttacaagtttgctaatcatctctttcagtatttttccatgagtgcaaattggcagctctgataggcaggtaggcctaaatttaatgaccttggacttcagatgtattacaagcacaaattctatatttattgttttcttatgaaaacactaaacaaatatgaaagagcagaataattatttgataaagtttctatatttttaaatgtcattaatgtatgtaattttagattaaattgactcctgtgaatatattacagaatgcaaattttgctacatttttgcaatacatattgattagattcatttctcatattcttttcagggatatcactgatttcctttttcagttttcagtatatttgaatgattactgattttgcgttcttcattgatttttgttacactactattttactttcaaattcttattaagacattccagtttttaataatctcattgaatattagcatggttcattttagttatgtttattttggaacttggtgatattattatggttggatttttccttattcatccttaaattaccaatataatttttatgaagttattttttttcaaacaagttaatgtccatatttctgattttagtatatacattacatatatatgtatatatacaaatattgtgtgtgtgtgtgtctgtgtgtaagtgcgtatagttgctttaattccgtttatattgagggacagcatggcctgctaagaacacagattctgatgccagattgcttgggtgaagatcctggttttgctacttaatagatgtgtgatcttggataaattcactaacttcactgtccctcattttctgtacagtaatgctagcccattgggttgtaacaaaaattgaaatatttactgcatgtaaagcagtgaaacatgatgagggtagaaggtttaattcatcacataatagagcagtgaaatttgcctccttgtgaaatattaacccctccgatcatgaaaatatccttcctaaaatgatttcataatcatctaaaagagacattgttaagaagccccagaaaccggatgggaagttgagtctgcttttctgtaaaataagaaaatattttagttattttttgtttttttgagaaacctccatactgttttccacagttgccatagtaatttacatttttttgggggggcggggtgcggagtcttgccctgtggcccaggctggagtgcagtggcgcgacctgggctcattgcaagctccgcctcccgggttcatgccattctcctgcctcagcctccagagtagctgggacttcaggcgcccgccaccgcgcccggctaatttttagtttttttttttttgttttttttttttttagtagaaacggggtttcaccgtgttagccaggatgatctcgatttcctgacctcgtgatccgcccgcctcggcctcccaaagtgctgggattacaggcgtgagccaccgtgcccagacactaatttacatttctacagtgtgcaagcattcccttttctccccatccttgttagagtctgttattttctgtttattggggtaacagccgttctatctggggtgagatatatcattgtggttttgatatgcatttccctgaaggttagtgattctgaacactatatctgttagcaatttgcatgtcttcttttgaaaaatgtatattcagatatttcgccaatttttcaatcaaattattactaccattattattttgctgttgagttgagttcttccatattcttattattcttcccttgctggatgcgaatggatagtttgcaaatattttctcctattctggggttgtttcctcactttattgaatgctttctttgctttgcataaactttttaccttaacatactcccatttgtcaatgtatgcttttatgtctgtgttttttgaatccttactcaaaataaatcttttcccagaccagtgtcctgaaacatttccccagtgttgtcttccactagtctcatagttttaggtcttacatttaagcctttaatccacatttacttgatttttgtatatgaaaatagataagggtctagatttattcttctacatatagatacccagtattccaagcaccgattattgaagagattgtcctatcaccagtgtatattcttggcaccgttgtcaaaactgagttggctgtacaacaactatggaaaacagtatgaagtgttctcaaacactaaaagtagaactaacatatgatccagcaatcctactgctgggatatatccaaaagaaatgagattagtatgtctattgaagcactattaataatgggcgagatgcagaataaacctgtgagatagatatatattatatatatataaaatatatattatatataatatgtataatatatataatatattatatataatatattatatgtataatatatataatatattatatataatatactacataataatatatattatatataatatatactatatataattattcatccgtgtatattattcattcatataaaaataacgaaatattttcatttacaacaacctggagaatggtggttaccacaggttgggaagggtagtagagatgggggaatgaagaagatggttattgggtagaaaaataccattagatagaaggaataacttatagtattcagtagcagcacagtaggacaattacaattactaagaatttgtagtatatttcaaaatatctagaagagaagatttggaatgtccccaacacaaatagtgctaagtgtatgaggttgacagatatcccaattacctttatttgctcattaatcattgtatgcatgtatcaaatatcacatatatcccacaaatatgtattaatgcaactgttatgtattcataatttttaaaagctacaaatcaaaatttgagaaacctcaaagcactgaataaaatatttttaaaatcactttctcttaaattttcaagaatttattagcttggttttgctactttaccttgaaaaactcatctttctaatatttggaagtaaatattaaaccaagagagaaggtcagagagatctatgatctgaaagtctaagaacaatgcaggaagaagcagctcataaaaattaatctgcaagtttggctggtcaggggcagttttgaacacaggcatctttgtctcaaaagaaaaagaaaaatctcttttgtaggagactttatttttctagtgcttttgaatgtactaaatcatctttagttatttatattgagtttataatcttactgactcagtgaaagagttcaaaaaatgaaatagacttagcacaacaatgcaactagaatcagcaaagaaatgaatgttttgttctgtcaaatcccattgccacaatagctctgccaatttgtttgaaaaatgtacaaccctggggtttcggcaccacttaacagctgaggggaacaaagtgtgtgtagtgagatacaaatcttctataccattagttcaatatatttctgcatagcagcttttcaaaaattggaagcatattttggcaccatgctgtttcaaaacaacaacaataaaatctgggaaatatatgcagaaagctgtcagcccttaaaagtactgtttttagtttcttttccatagaactactgcttgattgtcttagttcttctttatctattattcatccagattatattaacatgggaacaccaggtagacttaaagtttattaagtgtgtgtgactcaaagaattttgaacagggtgaataattcagtgcttaattaaaaatctattgactaattagggtaggatatatagcttacacaatttttggaaacaaataaacaaccccctcaaaaaagaactagaaaacagcaatatcacttccagattacaaaataaatatcattgatattttgctcatttgaaccaaggagttttcacataagcagatagggtgttaattaagagttttataaaataagcatttaagataaaagtattacatggctctactgaatgacactgttagaaaacaatgctatgataatatcttaataaaatatatctttataataagaatgtgtcaataggatactattgagttcaagaaattgtgctagttatttacatacattcttataatcctcacactaatcccacctgattttttttgcctttgttcttctgacaaagaaactgtgactgaaagagaatcgaaagtcacatcactttaaatttgttggacgcaacataacaaaaaacaaacaaacaaacaaaactccctaaacctgtttgatttcaataaatttttaacatgggtaggaatagttactgctggtacttctgagttatatggaaatatatatatgagaaactaaagaaaaataaaacactgaagagataaagaagcaaacacacattcatatacattcaattaatagttataaattgagaataaaacaaatatttgcttagtatcatgagagaggaaaaactactcttttaaagaggatccagtataaaatgcttaatagttatatttgagatatttggttgtaaaatactggatattaaatataagatgaggctcctcattaaattattataattcatgtttttaaatgtcgaagctacaaacacctaagcatgtttgttggtgattataatgaaattgtctacatttccaaccgtttgattttgagatacatctattttcatgaaatgtaaaatacattttggaccaactttatgaacattagtaaatcattcatctactcatctgatttgcaaatgaagaaaatgtaagagaatgaggattaatttctactgactcatatgaaaagcatggtggaacctcagttgtgtaacactaaagagaagtgattcatccaaggatgagtaggaccagaattaaagagaagataatgcaagtgtatcattttcctctacagagagtgggttaaggagggtatatgacaaatttgtccaatcctatctagtttggagggatggcatcagaactcccaaaaataaaggtgatcatatatggcagagagcgtattgtcatgagaaaggagaatattggttcatttagagtatggctacgagagaaagagacccaggatcctcgtttaaaacaatggagctgacaaagtctagcaaggtatcatagatcccagcaagggatcttggtcacagaaaagaaaaaaaaatcaagttgcaacaagaaactgaactgcaaatcaggaatcatggtgatatttcacttagaagaaaaatgcatgaattatctctttccaaaagacagtgagtgagcgtgcagattcccatggacactcctaggtattaaacactggacttagaatactttatctgtcagacacagcaatgatctgctaaggaaataaatagatctgtttaaagtcctttttttccatgtagaggaaaatctgaaacatcacaaacccacataggattaaacgttacccccaaaaaactcaagaaactaggatatattccttcaaaaggagggaaagtacttaattaagggtgaggctgcctttggaagacaatgctagaggtatatgacaaaaatggttcccatagttggactcgagttcttttgatgtcatttgtaatgcctgaccaaaactaccagtcactaagaaaaggatgacattgaaacaaaaattacttatatctgatgagtataggacactgctaataaatgcatttttcttataatggtgtatttatttagcaaagttatattgaccatccaatagctgttaaaccctagctttagccatagatacataaccctagtactagtttttggagaaaaaagatgactataactcaatcaatatatctgaacaattaacaccattaatccatgagattaatatgtaaaatttatatttttaaaactaggaagctaagaacaaaattttggtgatttgtgtagatattgtggacttatccacaagtttgaactgtatttttttattataacatcatttggcaacagtaattccactgttaaatggtggtatctatctccagcaagtgttatgatattaatattcatagcgtcattatttgtcagagtcaaaaattagaaataatctgaatgctcatctacccataaatggataagtaaaatgtggtttgttgatacaatggactatttttcaccaataaaagggaatgcagtactgtactaacacaggtaaaatatggatgaatgttaataacagtaagatgactgaaagaaaacattttaaaaaactgtaagttatatgatatcatatacacgaaatgtccagaacagacaaatgcatagagtaaattcattgttgcctagggcatgggggtttggtggagaatgagaggtgactgcaaaagaaaaagggatttctttttgggatgatgaaaatatcctaaaatttattgtggtaatatttgcacaacttgtgaatctactaaaaacattgaattctacaatttaattgcgcaaattctttagcctgtggattacttctccatacagttactgtatatgcacagccacgcacatacgcacacacaaatttacaggcaccatagccacactgtttttcttttttgtctcaaatattcaacttactgatagtatgatcttgattaagttacttaacctccctctgcctcatgcctatcatctgaacaatgggtatacaattagtacctgttttgtgggattactgtgaacatttaaataaagtgatacatatatagactttacagggatgcctggaacaacaccagagctaaatatatgcattgtcttgctgctgctgctacttctactactactatcagtagcacaataagaatattattctcatcatcattgtaattattattacaagtccaaccctgctcatttaatccatggaaaaggtatctcacctcctgttactgtaactactacatatgttgattaagttgtagctacatttctacctataaccagtcaatactttttaaaatcagttacaaaagaaatccttgtcccaggacttcgacccatacttttttgtgaaaagactaacatcttattccatataaaatgggaagttgtattttctccaactaatgcaatgtgaatattatgtgcacactctgctcaattaaagccaacagtattgggctagataatagctctcgttgcacaccagctcactgtatatttccaagtcggatggcagacttagaatatcagctttatggcaagaatatgggatagtaacacagccaccaggagactgactataactacttaaattttttcacataaaatcctcaggatatagtatctccaaagagaaaaagcaaaatctttaactattatagtctctactcttttatcttcacatctctgtaagtcttggtttaggctaaatgcatcattaatctttaacatatccacctaagaacacaattaaagtcaaatagaataatgagtggcattacaaggaatacaaagtagcacacccaagaatgctttcaactattccatatgctgcctaatcacgcacacccgctaacttgcacagtgccagacctagaaaaaaaattaactctttggtgaataagaatcagaatctttgaattagccaattaattttgaaaataaaggcaatgaccggaaatactaaatattaagtattttgaggcactaattattccataaggctttatattcataacatatttttaaatctcttattttgatttcaaaaaacatgactttagtcacaaatatactatttactaattgagtaacattgactgaaatctttatctctaggaatctcaatttcccaaactgttatatgcaggaaatgaattatatcaatggctctcaatctttagtctgtatcagaaccacgtggaacagagcctgagatctacacatacagatgtgttttaaagtcattgttccaatgtacaaccagaattgggaactactactgaggtaaataatattcgatatctatcccagttctgtaagtctaagggtttttatctgtgtagacaacctgactcagttctcaataataatactcttcagagaagactaagtttaagtgattactagaactaccttggcaaagcatttaaagaattgcactgcttttattttacttccaaaatgaaggcaaataaataaaggaaaatagtatttggcttatgttaccttaacaaaaacaaaaggctgcaatggagacaataaaataaataaataaaaacctctaaaatctaccattatatgatatccttcccaatacataaattaaaaaaaaaaacactgtagaggaaaaagcaatattttgaaatgatatgcttttctttgtttgtcttcaaacaattacatcttcatcataatggttgtattagtctgtttttacactgctataaagaattgcctgagactgagtaacatataaagaaaaaagttttaattgaccacagtttcacaggcttaataggaagcatgactgggaaacttagaatcatggcagaagaggaaggggaagcaaggatcttcttcacatggtagcaggagagagagcacaaagggggacacgctacacactttcaaacaacgagatctcctgagaactctatcgggagaacagcaagagggaagttcacccctatgattcaatcagctcccaccgggcttctcccctgacacatgaggaattacaattggatgagagatttgggtggggacacacagacaaaccatatcaactgtcatggacttaaacaattgtctttgaattgtcttttttcatacttttatttgcatcttttcactaaaaagatgacacaaagtaatcctagtttacattttttaccatgtaattccatattactttttcctgaaagttacttatttttaaatctcaaagctcttcatacttatggtttgatctgcacttacaactggatctcagaaagattgaattctcccatcataccaagttcatgtctctcactcttaatatttgttcccaagacaacaatttaacttctttctctattattatttcttccctttattttaatgcaaaccaaatgttaatatttccttctttagatcaattgaaatcacctcaaacctctgtttttctctaaaatgtctcaggcctaacaactacatatgaagatatgtttaaaatacaatatagggcttgggatatcattttatatgttactcttgattgcactaagccaaacaagttacaggaaaaatcaagggccgaatttttaatgaagagggatttggctcagattcgactgagttttcccacattcctcccaaccacatgattgcaaataaatggtatacgagttccctgacagtgtctgcttaagacactaccttcctttctctattttctgccctcactcacttactaccacaccctacccagctcaggagatgacaccttatttttaatttgactttccctaaatatcagcacgttgggtgcaaagataagctagtcagttccttcagctagtccctgacaacgcagcaactgacccttggctctctcatcccttcctctgcttctgaaaagattcagtacattttctccagctctggaaatatccagaggcttcaaacacctttatctttagaaagcataggctactgaatagtattaactcattcttccccaagcagataaaggctgtcttccaaactgagacctggcagttgaccatggatgacttatcctcagcagaacacaaaacttaggtttgagagggaggacttttgctttaacttgaatagctccttttaccggaaacatttttcagtttctgttttggcaaagatcttttctgtccatgagacatgcagagaaatagcacacctgcctaggcatagtaagtagcactttgcccacactgattgaacatcctttgactttgtaagtgtacagttgcctattagatagtggcagaaattgcatcttgaaaagcttaaataacctgccctctatcacagctagaaggctatgtggccaattatatagccttatttcaccccggttgtgtacctgcaccaaatcctatggcttgaagcaatctgaatgattttgttttaatttggcttgtgctgtttctcctttctcctcaaacaatcatttgagatactcttttgtatcaagtctgggaagtctttgtgtccactgattcacttatggataagaatcttatgaggctcaggatgacttgtagtcctttttatttatttcttttttctatgtttcttttttcttttcctttttttttgagacagagtctcattctgttgcccaggctggagtacaatggcaagatcatagctcactctatccttgacatcctgggtacaagcaatcctcacatttcagcctcctaagtagctgggactacaggcatgtgccaccatgcctggctaccttttgtattttttgtagagatgggttttcaccatgttgcccatgctgagctcaaactcctgagctcaagcaatccacttgccacagcctcccaaagtgctggtgccacaggatccctggggtgttgctttgccagttggaaacctttgtggtctctgacatctttgcccaagttttgctcagcccactgggctcattctgcccactcagcctggcaggctgcacttggtttgcactactagcctggatctttgcttgccaaggacaagccagatgcagagtggtgaggggtgcatcagtgagcgactgtggggttcagctgctgcgcacagccaggcacaccagctgcagcagggtgggcagctccagacactgacatgggtgccagctccctgcaacgctatggctggaccaggcatacggcaagtaccttccactgctggcaccagggaatgcaatggtgcccagaagcttggagatcaaggaaccacagagccccaaggaaggtgtcacagccctgattcagggagtttctagatctgggctccctgaaggaccacagctcttctcttcttctctcttctctccttcttgtcacctgcaatgtggtaagtgaggggtgtttcagccctgtttatgttatagctctttcagtcctgccattcggtgtgtcccaagtttttgtaccacatccaggaagaatgaggcacatgaacacctggagggtgagcaaggtaaagaggtgctttactgagccaagtacatctctcaggagacctgaagtgggtagttcctttccacaggcaggtcttccaaggaatgtagctctcagctgagaggagacccacagtgggtaactcctctctgcaagcaggttgtcccaatgtctgtctgagtcttgctgagtccaaggtttttatgtgtttcagaggggaggaagtgcatgctgattggtccatgagttgtcatgggcaggcccagaaaaagcaccataagttctcactctggtccatggagctggcagcccagcccccaggcttcaggccatccctggcttgaaagtgaggcttcacaaggacctcccctttccacccaggagcctgtctgtctccggctgccatccctggtgcctatgctgttcctgctgaggggcacctgcaggcccgtgccaagctctcctcagatacccctctggctccctcctgtgctcctccacacccaaagactggaggaagcctaggtgacaggggacggttgtgtcagtggggccccaagggcatgcacactgagccgggttgtgatagtgcccaggcttggcctcaactttgctcccaaataagagcaggtgctgggagtggggagaggtgcagagtggggagaggctgggaagtgggagcagacatttccaagcctgctggggcagatggaaattcctgggcatgaatgcccaggttcacagccaatgctgggtcctgaagctgtgccttggagaatggaggttctgcagcctctaacttggaaggggacagggcatctgcctgttcctagccccactggctctgtggagtgctcagcctcagcttcgccatcccctctgcaaccatcatcttcacagcagccactccagacaggccactgctgccaacactaggattataggcatcacactcagcactttttatttcttttaaggggcattcaaggctccaaaataaaataggatctatgattactttaatattgagtatcttcaaagaagatatgaacattaagttccagtatgacacttgttgtctgtgacacaggcaaggatggccccattttattttatcacgaaagtcatatttatttttaaatttctccattgatttcataattgttaagaattgtttttaaaacagattttattgaataaatactttcacctcaattttaaaattaaccagatttaagtaaataagaatgatagcttgtttaaataaaaatcagatttctagttgataaaacgctttaattccaaccaaaacaaagggatacttattttccataatccttgcatgctttgtttttgaaacaaatttaaaaatatatatttaattaattttttttggaaaattgagtcagacccttatcattgactgaaggtgcaaacaatctggaatgaacctgtggttgtaatgtttccttacctagaggttcctatggaatgtcttgttactataaaaataattccttttgtttgacatgatagggcctttcatttcctaaacataatttctcattaaaaaattaccctctccatcaataacagtgtttctctagtaataggtttcatgtgtggtattttaaaaaacaatgtcagagactgattctggttaaacaactgctgctttggaaatatcgtactaaggaatatatagagatgctcctctacttaccatggagttacatctggcaaaatccatcataaattgaaaatgttctaagtcaaaaatgcatttcatccacctaacttcttaaacatcatagcttagcctagactaccttaaatgtactcagaacacttacattagcctacagttggacaacatcatctaacgcaaaaaccattttataataaaatattgaatatctcatgttacttactgaagactatactgagcatgaaaaacagaatgggtaaatgggtacttaaagtacaattttttattcaatgtattattttcagatcatcataaatttgaaaaactgtaagtggaaaaattgtaagtcagggactatctgtatatgcatactattgtttaatcccctcaatgaccaataaatatcattataattaaaattcaaattaatcattatgaaacatattttacaagtgaaaaaatatagctaaaaatgagcaaaatataaaaccagatacctttcattttgtagtttcaaatttttatacaaccacggtgcaattcattattctttttatttatacagtggtatttatatagcatttatatgagcctcttttactaaaaggcagttttctatgctcctacaattagttgcaaaggatttttcttttttatatcaggcattttaacatacaaaaaaaaaccacctcatccttcaaatccatcatggattattgatttctgtgtcactgtcactttttaaattaatgtactttcctttcctctcaaggctgattgaaaatgtgttttcattaacatttttgttatggtagtgttctgattaaagttaaatggcaatgtgtaagaaatttgtcattcaaaactttagtctaattgctccaaattattgagaaaagactctactaattgtaattgctagaaaaaaaaagattataactaatttgtaagaaaggcagtgtctcataaaaattgcttcccctttgagacctgaggttctgatggtgatttgcatctgttgggtggtctcacaaatcaaggtattttaaacattatcttgtttattcaaaatgcctatggatattagcctgcaaaaaatattagtcactcttttattcattttgaagttaaagtttcatagcattaaggcagggtaataacttcttttggaagcagataattttcccattccctagatacacattgttcctttttaagtcatcagtaattttaaaaaatacaaaaaggacttctctagtctttatagccttcctacaatagccagtaaatcaaattcaaaattaagacctattcccattattaggtattttctatctactgcatggcattttaaaatgatatcccctctctttaagacaaactgtaatgtaggtgaaatttatctatgtcccagtttccactttccacttgttccacaaagcacgcctcctgtcagtccccagccagccatttctctcttgccaagtctagctgatgggggctctattacagaaggcttctgaactggttatgcaaattgactactagatccacacaatttaacctaactgagtactcaggaacttcaataaagaaaataaccagaaaaaaagagcctattctgggaattactaaaaaaaagagaaggaaaacattaacttgaaatcttccatttatctctctatttttcactttgattctaataaatgatattctttagagctagtcattctgccatagggtgtagctgctcataaatgagactttgaaatgccagttgtttgttatgaaatgttagttatttaacttgttccttcacaaaatgcagatcaccaatgacgaggacttttattccgcaattcaactccagttcaaggagaatatctaacacataaaaacatgtacctattcaagtgtatttaaatttaaataaaatttaaaataatgcttatgctatccatgcatgtcagaatatctcatttaattcaactactgctagcagtggtgacagcaacgtttgaaccctgacaatctatctccattttcttagatattattacaactacaaaaataaggcaataaataagtcattgatacaggcaacttttctggaatttagatctccagacatacattgttattctttcctcccaaatgagtaggaaacccatttcagggtggcctatctcttccaaagcatcagagaagacagaagttatttatttggttaacattattttaatactcagagaaaagaaatctcttactcttgtcccaattgttttatttgttggggacaggaaaaagacttctggtcatgtattactaatgactgtagaattcctttatttgtgttgtaatttcaaccatcatggttacttttcacttacactgcactactgtgtttgaacttaaacagttattacaatttaacttccaacatggttttggtatcagcatgccctatttttaatatttaagtacaaaaggaggcaatacttttatgatttccacacatgttcaaaatggactcttacatctgcagctccagacctgacttctttatttaaattcataacttctattcccaatggaagacttccactacttttctctcaaatgtgaaaggaccatctccattaaggtccaacttgttcccaaggccagaatcatcctcaggttccaggaaaacagttttataattcgacagacattaacttgagtatcttttaagtaaagtgtaatacttatgaaatttgattaaccagaatagtaactaactagtcttatgtattttttaaatggaagctaaaagtctgattccttcaccgtgcactcatttttcttgggacaatataacttgcttaaatccctgactgattctctaatcctggtacaatttaaagtaattgtattgaaaacaatggggaaaaacctgatcagaaatatttgtttttttttaataacttcatgtatcaaaaggataggttgctttgttgttaatatttctatcagattaatttttattgacttatcagagtaattaatgtaattcttaaaatttttaaagtaataaagaattttattaaataattaaaaatcaatattaaataattcccccttaaaagtcagagaccattcactaggttaaaaagctagctacgtgggttctatgtaaaagatgtggccggatggggtggctcatgcctgtaatctcagcactttgggaggccgaggcgggcggatcacctgaggtcgggagttcgaaaccagcctgaccaacatggagaaaccccgtctctgctaaaaatacaaaattagctgggcgtggtggcatatgcctgtaatcccagctactagggaggctgaggcaggagaatcgcttgaacctgggaggcagaggttgcagtgagcagaaattgcaccattgcactccagcctgggcaacaagagcaaaactccgtctcaaaaaaaaaaaaaaaaaaaagatgtataaaatacagtgttgagcattaagtaacaaatatcaggtgaaagtccataaaatggaaagcaaatggggaagtattaaatatcagaaaatgcatatttgaagttaaatgtatcaaataagatgaaaaatattttatgagaataaaaaccaacaattttgaggaaaatacaactgccatgagccctttaaaatataaggcacataagtcaatacataaaggctaaaagaaaaataaagaaaggtagtagttggcacacacccacctgcacacacattatgacagagagttttcaattaaaaaacaaaaaatttcttctcactgtccatgaactatttgtaaaaatcaagtatgtatttggccaaaaaagaaaacaaacaaaatatttaaatttaagatgttttctgctgtgtcatataaccataatcataattagaaaaatgtatgttaacaatggaagtctcaactacttagaaattaaaaaaatatagtggccaattctcagatcaaaaagaaaatacaaagggaattttttaaaatcaagaaaacaattaaaatggtagtatttcatacaacttttgaatttattttggaaatgtttattttaatgagctgattcaattcatcctagaattttactatttcaccatctgattgcatgcaagtctaattcagtcaaaggatgttatcatatctcctttgtcatttctaaatttgtctgtttctttcttgtaaatgtggtctaatgtatcacaatttattataaaaattagaaaaacattagtaatggaatagcaccaaaagatgctaaaacatcacttattaaaattatttaactatttactaataaaaaattctcaacaaatacatttttaaaactcaatatcatgataacgtctcactgagaaagtgatattgtctgtagaacattaaagtagctgaaacagttttcggcatgtatcttggtggatattattcagccatgacagtaaagcaggtatgcagggcgtgtggaatctgaggaataaggaggccagcatttctgaagtaatatataacagggagagtgtaaggagatgaggctcttgtaagaactctaaactcattttaatctcagtaaaatgggaagatgttgcaaggatgaaatcaggacaataaacaaaaatatgttgtaggataacctgagaatggaaaagtcttcttgctattcataggatatgataaaatttatacagaagaccataattatgaatgtcttttttcctccagacatagtcaatagtggtagtacagattcagagtatgtagagagtcagatgtaatcgggcttgagcttatgccaagggcaaggatgaagtgagataacggcaggatagatatagtcaggaaattaaatacattagagtgattaaaacaattaactataaattttagctggttaagggttgaacaaaccatgaaattcgtcgcaaaaagatgcggtagtttgaaatataaaagtggcataaaacaaatgatcaaaaagtggaaaatatgatgcttttagatgctaaaatgtaataaaaatataactcaacattaataatatttcaaatataaaaataatttttaaaattaaatttaattataatagtatcagcacttttttaattggacaaaatgaactgacttttttatgggaaaagagatatctactacctgcataaatgagaagattaatgatccaagaaagtgcatattcaaaccaaagacatgtaatcaagtcagcattttattggactagaaatacaataattaaagtagtgaaacggaagagaagatttatcaataggtgtcactttatataaaaatattatgtacaggccgggcgaggtggctcacgcctgtaatcccagcacttcgggaagccgaggcgggcggatcatgaggtcaggagatcgagacaatcctggctaacatggtgaaaccctgtctctactaaaaaatacaaaaaattagccgggcgtggtggcgagcgcctgtagtcccagctactcgggaggctgaggcaggagaatggcgtgaacccgggaggcggagcttgcagtgagccgagtgagccactgcattccagcctgggcgacacagcgagactccatctcaaaaaaaaaaaaaaaaattatgtacaattacgtgtgtgtgtgtgtgtgtgtgtgtgtgtatatatatatatatatcccaaataatttacacattgacaaggagttagcaagctatacaatggagaattcacatatgagcaagtttacatgtttataagtatatgtaaacataatcaatctctttagtagttacggacatgaaaataaaattacaattaattaccactgtatccctaatagatagataaaaatttagaatgagaacatgtatcactagcgtttattgctagtataatgtcatatttcataagtataaatttcatatatatatttcatagtataaatgtcatatttcagaagtattatgtctttaaaaaacctgtccaacagttcttatatctattaaaataaaaatgtatctagctataacccaactcccgggaatttattccacagaaataaatgctccaataaacaaggtaaaagcccagcaaaaaaaaaaaaaaaaagaatggaataataaaattatggaaaaattagaaactagaacattatataatctttaagaaaatgaatgcataaaagatagaaaggaaggtttttttaagcataagcatagctatctctataaaacaatcaaaataacaaaatgtatttatgtacttaacatatatttattggacacgtggccgagagctacactgtacattattgtagccaataactatatataattttttatttgaaatttattgatacaactaaataaaaattttaaataaggaattagcccctcagtagcaccagctactttccaaatgctcagtagccaccagtggctagtgctatcatatggagcagtgcagaagtcacatcatggcaaaaagccctattggaaagaattgtttagaccctgttgtagggtccagagatagattacctcacaaaactgatgtaatttctgactacatctaacttctaaagaaaataagaaacacatttataatgtcatccagtttttgaaaaataaacttcaaaaatatcctctgggatgactatgtgtccatatgtttaagtttgcatataacacatgcagaaacatatcttgttatttgttgtggacggtaggatgaaggatattggcaaaatgaagtttaaaaaacataaaaataggacataagtaaaagaagaaaagaaaaaagtgcgtatctaaaaatagcatgtgacataactatatgcatgtacttaaaataatgtgtgttcgtggaaaaataaaatgattttaaaatgtggggaaaaagagtgccatgagataatttttactgtagtcttaagttgtgacaagttttgcatgagaaaaatatgggaatgcatttttcccagatagctagaaactgcaaaacaaaaggtttagctctgttggtaatatttctcagaaattagggacattgtgattccattgatatatggctttgattttatttccatatggctgtgagcaaatttcagttctcatttcatgataatgtagaaattatgagctatttcaatgaaagtcaacccacaattcatgatttttaaggtttaatggatttttatgccatacaacctaacaaagtaactatgtagactgattttaaaaatagggtgaaaaaaagctatttccggctgggcacagtggctcatgtctgtaatcccagtctttgggaggctgaggcgggtggatcaggaggtcaagagatcgagatcatcctggccaacatggtgaaatcccatgtctactaaaaatacaaaaattacctggacgtggtggcatgtgcccataatcccagctactcgggaggttgaggcaggagaaccacttgaacccgggaggcggaggttgcaatgagcggagactgcaccactgcactgcagcctggtgacagagtgagactctgtcaaacaaacaaacaaacaaaaccccttatttccaatggacagagaaaaagaaagtgataacaaatatttctcccaagaagaagtaggtagaagtcttatgtaaaggaataaaggataaacttacagagatatctgattgaaagtactgcctctgaggtcatgccttcactgacttacccagaaaagagttgatgaaggtattacatttccctagtggattacaaaaataaaaataaataaataaagatggttcatttttgtaactaacccaaatgctttttttttttttttttttttttttttttttgagacgagtctcgctctgtcgcccaggctggaatgcagtggcgcgatctcggctcactgcaacctccgcctcccgggttcacgctattctcctgcctcagcctccagagtagctgggaccacaggcgccagccaccacgcccggctaagtttttgtatttttattagaaacggggtttcacagttattagccaggatggtctcgatctcctgacctcgtgatccgcccgcctcggcctcccaaagtgctgggattacaggcgtgaaccaccgcgcccggccccaaatgcttattttctaaagccgattttctgtggaaagtaatcatgtttaatttaaatctgggttccgctattagatataaaggggtagcttgatgaagacaaagcctccctctgagaaaaattataaaatctggataatatactaagggaaaaaaaatcaaagagcaatcctcaagacagttgtgagatgggtggtgaatggggttggtgtatacctgacaagccctgccagttttccacgccgtgaaggtgccagtgtgtaagcactggcagatgtagtaggaaagagctggggcacagctcctttgtcagtctctccaaagtggaaggacacacacagttgttcagagctatttaagttagtcaatggaaggatcaggatttcaatggaaaggaacagcagagaagtggaacacaacatttacaccacctttttgttgaggctgatgcccattactaagctgctcaaaaggaagtgtttgagaaactaagtaatgagtaagaggctaaatatctaaacagagctatcagcatggttaaggtgttgagaaactaatgaaacttaaattttaccaaggaaagaatgggacgtgttaaatatgtcatgtgtcacataaaacccctaaaatactatttccaagggactggaaaaaaaccaagtaaagaaatcgtctacaacaagcctgaaatgtggcctgggaacatgggtggccctgatggctcaaggtaatttcccctcactctgtctaccacagtatatctatatctaaatctacatgtatatctatgtagctatatctacatatttcaataatctatctatatctatccacctacctacctttctgtgtcttttctaatgtaaataatacactgctgagaagattggttaataaagaaattctaggcctgtggcttcaccactgaaatcttctgaacatttaaggatgaaatgggagcaatattcctgagaagagaaaaatatcttggattagttggctttcacactgctataaagaactacttctttttttttttttttttccaagatggagtcttgctctgtcattcacgctggagtgcagtggtgacatctgggctcactgcaacctccgcctcccgggttcaagcagttctcctgcctcagcctccagagtagctgggattacaggaatgcatcaccatgcctggctaattcttttttttttttttttgtatttttagtagtgacagggtttcaccatgttggccaggctggtcttgaactcctgacctcatgatctgcctgcctcagcctcccaaagagctgggattacaggcatgagccaccacacccagcctaaagaactactttagaataggtaatttataaagaacagaggttttattgagtcatggttctacaggctgtacaggtagcatggctgaggagtcttcaagaaacttttaatcatggtagaaggtgcagaggaagcaggcacgaagcaggcacatcttacatggccagagtaggaggaagacagcaaagagggaggtattacacacgtttaaacaaccatatctcctaagaactcactcactaccagaagaacagcaagggggaaatctgccctcatgatccaatcacctcccatcaggccactctcccaacattgaggattgaaatttgacatgagatttgggtatggacacaaatccaaatcatatcagacctgttgttattactacttaatagtgatttataagttgataaccattttggaatattatagtgcctgggaagtccaaatgaataataaatttgttatacagtaattgtatctatttttattttttaataattttgatggtgaactacttttgtgctgctacatgtatgttcagtgtattccctagctctttataagttttaaaattacaaattgatttcttgtagtccttcataaattaaaggaaaaagatttacataaattattttgaagggtctgtgcttgaggcatattatataattgagagctttagacaaatgtatatccatttttgcaaaatgaatgtttatcaactagttaacacattgaattttgttatttttatgctctaaacagtaatgatttagctttataaggcaaagttttgtcaattttaattcaaccatagattcttagtgttctaaaaaatcctcagaaggaaggggagaaaattaacagtcaaaacttttagcaatattgtttcaaccatatatattatttaatctggagatggaagagtaaaatatttggcaaatatcctatatgtttttttcaagggttctaaaaaatagcaggtttacttaggaaaggaagttgacaggtctcattaatcttttgttataaaattacataattcatgcttccacaattatgcattggacacagttctaaccccattaacaacgaaaggcatcaaaatgtttgaatgcggacaactgaactattaaaaaacaaactttccttttttctgttctgtgtgcaatatattcttcttaattataagaataaaatatttgaaaccatcactgaattcagttaggaaaagttttcagacatttccggtgtgaccactagcctgtatgtatatatattcttaaagttatataccttgaaatctgtttttcactaggaatcactgttaacctgtgttattttatatgattataacaaatcatatcagcatgtctatatacttctttaaaaatcccaaaacaatatacaattaaagggaagtcacacacagaaggtacataattttcgcccactaagtactaccaatacccagcattcactgacttaaagtgtaaattactttaatttcatttatttacagaggtttagtacccctccaaggtgtcttacaaattcccagctttctattgagttcttagacctaattatgtttctctttgttacagcggttccctacatttgacctcaggatcctttgcccgtgtccatacactttgccacactgtgtttcctctattggcatcgttttgcatatgatagagcttctgaaaagaaaaacaagttcatatcactgttgcagcttgaacaaaagaagcatgtcttacacacagcagagtcaaactccctgttgtatgtggtcaaaatgcacccatggtactcagagtttgacagtgttttactctaaggggttccacaaataaagccaattagtaattatactttatgaaaagctcaataactgaggaaatactgcaatttgtttcaagtacaaaaaacgggcattgtctgtggtaagagatgatggacttttttctttctgtaaaattttatgaactccttctacttgtaaaacgatattcccttcatacgaatgtatgttaatgtttttagagcaaaactatttaaaactcacccaggataaaatcatcccagctaactttcatcctttgagaaaagaaaatatgataaattagtttttattattcattttaatacaaaatggttctaaaaactgaaaataatatatacgcatatacatttatttatttactcggtgacaatactcaaaaatttttatgcaaaatatgtactatcgttacatcaactgacaagtgccaaaataccttgttttaatgttttggcatgattgcacctcaatatcacttctattccagaaaacatagaactttaacatactcataatattctgaaaataaaacaaaagcttactctttgtaaaacaaagttttgaaacaagctttaaaaaaagtgtcaaatgtttacaaatatatatgattgtgtttatgtgtgtactatagatcaccagggagaagattgagttttgtttttgttttgttattgtttcaatgttccttctcctaaagcccagtcattttctccttgtaaattctttcagatgcataattccgtgataacttccttcatagtcattcttcagtctcttcctcatctacttcaccctgaatgcttctgtgtgtttaatatgcatagaacatcattgtaaccataaattacttgctctgaagcttataattattgtctattcattctcgttcggttcaattttttttattctccaatctttagtctctgtttcagtcaggaagattttctgtacccaccttttttatgtctgcttttgaacctatcagagatgttcccacaccttaaaagtctccctagttttattagttagggttctgcatacagatagaagcaacactatgtagatagatatataagaggaaacttactgtgagaattggctcacctgattctggaggctgagaagtctccagatacgtcttccacaaggtcaagacccaggaaagccagcgggttaactcattctgagtcccaaggcctgagaaccggaggaaccagtgtcagacaggagaagatggatgtcaagaagagcaggagaatttgggccaagggtaatagcttacaccagtaatcccagaacttcgggagtccgctgcaggtggattgcttgaacccagcagttggagaccagcctgacaacatggacaaaccccatctatacaaaaaataaaatataaaataaaataaaataataaaattaaattaaaataaaataaaataaagtaaaataaataagtgggctgtgatggcatgctcctgtagtcccagctactcagaggctgaggttgggaggatggcctgaggctgtagtgagccgtgatcctgccactgcactccaacctaggtgacagagtgagagactctgtctcaaataaatgtaaaataatcaaagaaaaaacaaaaagaattttattctatctgggccctcaaatgattggatgatgtcctcccaccttggtgtatatgtagacatatatactatatatacgtactgtggaattctgtaatttaaacatagatgctgagaatctgcaatttcattgaatttgggggcaaatgtaatcttcttttatccataatctgtggcaaataggatacagcacttctcttctgctaactctccaggtacatctgccaccacacttcttccatactatgcaagtacagctcccatatgaattctgcttaaatcaccaggcctcacatgagcacactgatctccactactttgcagactagttaccaattcttgaacatttcaacttggtttaaattgcaagaacatatattagtattttaccaacacttttcaaacagcttttgttttcctgagtaacatgagatccctcagtaggaaaattataattattttcttctgatggattaagaggttgagatcttagagtagtgatgtcctcaggatcacgtatgaaataaggattaaagtcagattctgtaatgtagaaggcttttattatcattacccagatgcttcccaaaggagtaaaatttacttgggtaaactgtaactctttttttgagtagataattgtatacaaatctttagatttcagttatatcagtaacaatagttccttgctttaaaaattgtaaaattgttctatattcattatctctccacttatatatcattctattcacatggattttctagctttcccaatacctggatatgtttgcatttgtattaaatagtatattaaatgtagtcaaatatagtcaaaatcagtatcttcttttaaatcattgtctggttctccttcaattgtttctaattattgttttactgtttcgtagagtctccactagatcatgacaatttttttcataaaagtaagtcactaagtttatataaaacttctctcttaaaattgagaatagtgcttgatagataaatgactatagaagaacattagaactattagacattaagaaaataaaatgtgatgttttagaaaaaaaaaaaaaccttgattaaaaaaatcaattggcatctgtttgctttgtgcccatacatttcagagactttgataaaaataatatagagaattttgatgagtacagtgtaagattgaaatgcagcaataaaacagttggaaagaaacattatattttctttgctagaacagtggtacaatagcatataagccacaaaaaaaatatgccttatcaatgctttttctaggtgaaacttatcctagcttctaaagggttttctgattatgatctgcatatgacaaaaacgtttcatgctcgtgctatcaaataaataatccatatgaaagtgcataactttattcttagaatagcaacgagtcataatctcaaagtttattgaggcaattccaatttctttcaagcaataaagtgaatttagataagtattttctaaacacacaattaaaaaacattaaaaaattaactcttgcatttgtcatattaacctttctacatttttagttttcagagaaaaaataaaaataaaaacaccactgacatgcctcatagagcagcaacaaaattagaacattgtgccttggcaaagagaagagaagcgcataagcataaaaatcctcaagcaattgctttagttgttctatttcaaaaatatgtgtgtgtatttgtgtgtttgtgtgtctattcatgcatctataaattagatataagtatatgtataaatgtacgtatgtatacgtgtttattgttttagactacaataacaaaacattatagattgggtgacttaaataacagataggtatttatcacagttctcaaggctggaaagttcagagtcaaggtgcataccaattgggttcctgatgagggctttcttcttgatttacagaccatggtctttttgttctggctcacatggcagaaaaggatagagctctctggtgtctctttttctaaagatattaattctgtcaaaccagagctccactctcagtgacctcatctaacccaaattacttctcaaaagctccatctcaaaataccatcacattgatggtcagaattttgagggtgggaatccataggcgttatgtataaatatgaatatacagatagaattacacatatttacatgtgtatatatttgtattcatcattcatttattcaaaaatagctcaaataatttagttagcttaccctggcaaaatgccacggttttttgttttgttttgttttaaatggagttttgctcttgtcacccaggctggagtgcaatggcatgatctcagctcattgcaacctccgtctcccaggttcaagtgattctcctgcctcagcctcccaagtagttgggattacaggtgcccaccatcacaaccacaaaatgccatgttttaattctctaccactgttgtccaattggtcgggcatggtcactcacatctgaaatcccagcacttcgggaggccgaagcgggtggatcacctgaggtcaggagtttgagaccagcctggccaaaatggagaaaccccatctctactaaaaatacaaaaattagccaggcatggtggcatgtacctgtagtcccagctacttgggagactgaggtaggagaagcacttgtacacgggaggcggaggttgcagtgagccgacatggtgccactgcactccagcctgggtgacagagtccatctcaaaaaaaaaaaaaaaaaaaagaagaaaaaagaaagaaagaaaaatgttgtccaatagaattacaataaataataaatgcaaaacgcaagccactttaacaaatttttaattttctagtagtcacataaaatataaaaagtaaaagatgaaaattaagtatatctttttactttaatattatttctattgtaatcactgccaaaattatcgatgaaatattttacattatttttcatattaaagcttgcatatcagtatgtatttcatatctgcagctcatctcaattaggattaacaatatttcaaattttcaatagtcatatgtggctacttgatatcatattggatcacacagctctagaacgacttaaggaaacacttaatccatttccactttaaattgttgctttaacagaattatcttccagaaaagccatgtcctctgagaacaatataaaggaacattcacacttaaactctcagctacttttggcaaataaatattttgactaatttaggatatacaggataatataaaatatcctatacagatatcttaaagctggtgttaacgcaaatcaatgtcttttatgaaaaatgtctaagcagatcatatactgcaaaaagaaactgaaaatgtttcaagtgcctcattttgctcataagattgacacaaagcaggttcaattgcttaagaagaaaagaaaccaggggagaaaaggaagtggaaaacccgggagactttagagcactgaatgactgaatccagagcctcaagtgtttcaacaaggagagtttaaatagtggtttgagcttgagagactgtgaatgctaggagctattaaagctataaagattgcattctgaagctgtttattcctgaaagtgagtggggaaatctcagggtcaaaggaaaacagaactgaatgagcttctggagtacctcgggattaggggtttgcttttacaatactgtattttcctatggtagaagatgaaaatatggagagaaaaatacaagcatttttctcagattcagaaaggagaaataggtagcaacagttactgagaaaggtcaaaatcgtgacattgggagttagcttaatgcacccagagtttgaacttttttttttttttgattaatgaaattcttcaacctacaaaattggacaccaattggaaaagtttctctcacaaaattgtccctgttgtgtaactcttggtgaggcattttcaaggttttgatacttctgtttatataagtattttatacttggccaacattagtatttttaaaaagtaatttgtttttgagacagagtctcgctctgtcccccaggctagagtgcactggcgcaatcttggctcactgcaacctctgcctcctggattcaagcgattttcctgcctcaccctcccaagtagctgggattacagattacaggtggagccgccaccatgcctggctaatttatttatttattttattttatctatttttttttgagagagagatgggatttcgctatgtgctggtctcaaacttctggcctcaagtgatccacccacctcgtcctcccaaatttctaagattacaggtgtaagccactgcaagcaaccttaaaaagtaaatttttaattgtattatttggtgaagggaaaagggcaggaaaaaaaaaaagtaaatttaagtcgagaagccaatttttttaatccttctacttatctctccagaaacctttgtccggggcatcctatcttaatgacatcctccaccagggtcctgttctatatgaacttaccctctgagaaatatgtgcatttaaaaataccaagggagaagaaacaaatggatttatttaataaaacgtaaaagttttgaaatctgaattcgaagacactactttagaaagctgggatttttcccaccactcttcacatcttatcaaacatgcaattgcccatatatgacaggctcagaattgatcatcctatctttagtaagttaggagaaagtaacagtagcaatggaatgctaattataatagcaatgatcagagaggggagagaattcaatcacgcatattccatggacataaaaataattgtaatccattaaaattgtagattttgtcattcgaagtagttgaagtcaacacacattcccatagtactttcttctagtaaacgctgacagctgtcaatcctcctgctatctcctcccaaagcacagtaaaaataaaaatgtaataatgtaatttttgtcccaagacaagctagttacattttctattcggaaaccaatttccaactctgcaacaagaagcaatttatttctattttcattctttacgacagcatactcttttgataagaatcattgattgccggatacatatatattttttctacatgtggtcatatgggcatcctgtcctcatcgccctatactctcctgaatgaggagattccatctgctcattgaccgtgaagtttttatatttctccaaatatttttctaaaaatatatgtacattagtactgattcaaagtacaacttaattgcgctattgtgtcaacattaaatatcaaatgtgaaaaaattcaataataaggcacttcttgtgctttgttgcttctgtaaggaaataaaagtttaaaatgttactctttgtcaaaactaatatcctaaatttttaatgagctctaccaagtatttgaataactgtgaaaaataaacatcatgattcatttaacccatgtttagggtatttgattttaatgctttttggtttgtatagcaatataagacagaaaccaatcttgaaacaacatctatcatggagatgtcataatatataaatgttttgatttagggaaaaaagtaaaatatattaaattttatggaatgagttagagaataaataaaatttagacataaaagctcttaacagaactgagagtcttagaatgttgcttttaaggatcttcaaagaatagccaaaccaatttttctccattagtgttatcagttgtgtgtgtaagcccagtattctatttttaatcacagtttggatagctattcacttggcacattcttaaacagtctgttccctgtcactctactgaaaagaaatctaattctaattgatcaacttgtaattatgaagacagaacttgttttattgattttataattatttcataaataaatgtcaaagttttagtttattcattcatataataaatactagttttcagaaatccaattgccagggaaagaatgaaggagaaaatacagagaacaaatggctaaaagagttgaaataaatgtcctacaatgtcaattccaaaataagtaagcagcagccacttttcttgatgactagctaaaaatagttaataaactgctataaaaattggcaagtgtgggaatgtgtaaaccaagatatccaagtattcgatgtgtacaaacttatatattagatctttaagctatttctgataccttggagcaagtctacaataaagaaaagttgacagagttccaacaaaagtcaatcattaatggtgacttatttatacaaagggtgcaaggaagaagaatctctgtaagtcaattattgatgccttgcttatgaaataaattaaagagggtcacattgcacttctttatcacttgtcaaataaaataatgcttgctgactttttaacatgttgaaatgtcaggataattttaagtgacttatatcaatatataagcccaagatgaatcaagtgaaaaatgggccatctgtcatcaaatcttatgaaggatacttacaatctgaaagtgaatattaattatatttccatttgatttatgacgttaaaaattgaaatatcacacatagttgtgaactaatgaatcaatatttgctaaaagttctggaaaaacattaggcagtgatattctcttcagtataataaatataccttttataaaaatttagtatttggtggtatatataaatgcagaattcattaattcttataattttatggacaatacagactcaaaaataagtaagcagtaagccatttgtcttgaaaattaggtaaaaatagtgaagaaactgctgtccaaagaaattgtgattattcacagcgatacattttctaggctattcagtatagtaatgaattaatacaacagtggacttaatatttgcactcattatagtaattttggcttatttattttctctagcagagttccatgtatagaactgtaatttctctaacttaattgttttgcaaaatgtgcaattataagatcaatcaaagctgtcaaatgcagggaatcttgggctcagatttacactaactccccaagccaataagattcttcacctctgagagctgtaatttaactctttgtacaacgtagggaagaaacaagctggcgagaagttgatcttcactgttcactgtgggccagggattgtggtatttcctgagcaacttctcgtaattttcataatgctttttggaattattaataatttgttataatccattatgccggtcttttaaaaatgaaagttatactcaggcatgtaaaatcatgatctgtattaaaataagtatggtcgttccagtcattagggtgtttatatacatatttatttatcctgtagttacaataaacaaaaatcatgatagtaacaataaaataatagctatatgttataattttaaaagttctcacagttttcatatataatttatatatgtcactttactttgtttttctgtgttctgtgtattatagactaatttattttttcactttacagaaaaatttctgtgtagtgaaattttccaaaaccacagtggtaatgtgtagcagagtaaaagcttaaaccgaggatattggtctccaaatattatgctttttatactttaaaatgttgagaattatattaggatttcatggagacatcccacatgcaagtctccaaatgaccaacaccatgagccatttagctaatattagagtgcaaatctgcaggtatgaagaagtagtttatctctctccatgcaaaaagggctcgtcactgtaagatttttagtgtattgcatggtttgctttattcaggcagcattctctctgacttgagtaacttgctcagcacccccatccataatgtctaacataaggagcccctcgtgggataatccattctaaaaattgcatatcccatattcctgtaatttttgttgtttgaatagttttaaattagaaacacatacatctcaccatgtattttcatgtataagtaaatgtattatttgctcttatagacacatttaggcaatacataacattccaaaagtggtttatgattactgactttgactatttttgttaccaaagaacacacaaatttaacacattgttggggttaaaaaatttaagtgtacagcttgtaaaatttattttcatatatttttcaatacttttcttggaacatatctatatgtttttctgttagaataaaactcacatattttggcaagcaatcaaatctgagcacattttcagttacatcttggagaacaaatgacttaaaatataaattaaaaattagttttttttaagatatgagatatttctgcatgtaaaaagacctcttgaggagaaacttaaaattatatttttagtgagctcagagtagagctgagagtgtggaaatcaggtaaaattttcatattattaactagctaacaaacaatgctaataaaataattgcatgctacttacttttctaaaatgtgtaacagaaatatatttttcttcatgctaaaatgtttcacagatacctatataagtatccagatccttcaaaaaagatatataataaacatattggtttaatgtatgccaaaacccagaatttccttatagaataagcttaccacaatgtttaatgcctgaagataaaaatcttaacttttatatctggttttaattttcgtaagtagtagatgtattgggtctctatcagctcccgcaattttctttcccacctttagtactaggttgcttattaagatcaatagagtaagaaataataaataaagtagcttagataggtctaggtatactgtttctgcctattcctttcatatactcctcctgtattttcttttaaaattgaatgactgatttcatgactttcaggtaagtctcaataatgagttgcattaataatgaagaacctacatacagctctttattaattattttggcatatattttctaattcaaattagcccacactcttgagatttagataatgattaatgagcaattagatattcatcaaatgcctactatgacagcgcctatgcttagtactggggaaataaagctgaacaacagcagcaaagccaaactcctgtaattacagagctacaaattcatagtagagtcaggtaataagcacatagtcaaacaaagtaaaattggtgctctaagtgccatgaaaggaaattaatggctatatgaaaactgacaataagaagtctgacccaatcatgcaggtcttagaggggccttaggagaaattcctgaaactgaaacctaaggataatagaaaaaatgaatggggtggaaaaatgattcaggcaaagttttctgtagctgttgtgcctggcttggtgcatgtagtaaggtaaacagagttggtgtggttcacatagatagagttggaagaacaatgacaaagaattaatgtggagatgtagctatgctaacagtaacttcaagttagggcaaacagctaaatatgcattttaaagcatttcactggctgcagtgtttgaaacggttgtgcatatgtgtacaaggatataagatggagaagaaagatgtggggatatgaactattaagttattgcagccacctagggtaaagatgaaatggctaagcctagtaggcaaatatggagagatggatagacttgagatgtagttaagaaaataatgatgaagtctagaaaaaaggtaaatctgatagtaaaaaggggtgatgtaaaacatgattcttatgtttctggcttgcatgattagaagaatgattatatcttttaatgaaaaagggatcattggatcacaatcaagttttctggagaatatcatgagttcaaacttggttgcatttactgtgcggtggctgtggatacccacggggaagtgtatataggtagttgattgagctcataagagagttctgagccagagtaataaactcgcgtttcaacagcgtaatattaagcaatagaagctttgctttccataaaagcttatgtttctaaaatgtgtttttaaatttgtcataataatctgatagagccatacaaaaatattgcaaagtttgtgttttgcaattttgttgtaaacagcaatatctgcatgacaccttgggaaataaatttaatttagagcttttaaaagttgctacagagctagctttatgggagcttagataagatagaaatagagaaaaaaatcaatcttttgtttaaaactcaatgcacataatacacagtattcaataagacagaatttcaggccagacatagtggttcaggcctgtaatcccaacactttgggaggctgaggcaggcggattacttgaggccagaagttcgaaaccagcctggctaacatggcgaaacccggtgtctactaaaaatacaaaaattagccaggcgtggtggcacacacctgtcgtcccagctacttgggaggctgaggcaggagaatcacttgaacttggaaggcggaggatgaagtgagctaagattattccattgcactctagcctgggtgacagagtgagactctgtctcaaaaaaaaaaaaaaaaaaaaaaaaaaaagagagaattttaaagtattgctaaaaaaggctagtttaatcaccagcaaagttgtttgttgtgcatgtattttggtgtatgtgtgtgtgtgtctgtccatgtgatataataaacacttatatatacactctaattaatacttacatatattatagcacacaaaatgttcaaggaaatattctatttgctttatttatgtgaactccgttaatcctccaaacaaccctataaggtaagtattttttgttttcccattccgcatatgaagagaacaatcataggaaagctaaatggccttttaaagcccctccagctagtaaagggataagctagaaatcaaacattggtgacctgctttagtgttctgctctgtgtacatttcattattgttttccactattcactcactgccttccttgtaataagattccataccccatggcattgtcatgacttgcattgacttcctatgggaggaatactcgcccccatcccatcagatcgtatttgctcatttgatttgttctgaccaatgaaatagaagcagaagtgacagatacattgcaaaaccgtactcaaggtggccttggaccaacccagttttttctcccttcttgctataatattcaagaaaaactaagaatatgctgggaatacaacatcccgagctaggaggggaactattaagaagagcctgtgttctgttcttctctctgctagaataggaggtccttcagtgctttagcctgtctggtcatgttttccctgaggtacataacctgggtttggttgccttcctttaagtgttgcaagtgggaagcatccaagtgagactctattcacccggggcagctatcctgagtcctggggcattgttttacagtaaatcctaggattctgttgtcccttgttgcttatatattgtaataaatgcactttatgtaacttgttgcatatgagtgtgttctgtctcactgaactcaagacaaattcataaccagtgcccagtgaacctgcccaacagccctttctaaccatagggcttaagagacattgagtgcatttaccagctttcttactttctcctccaacaacagtatgtgactggcggagctgctccttccacctgggtcctagaataagtcacatgaatagagacactaacaaccaacagctcctaatatagcaagtaaaaggaaaataaatgattctgattttaagacaagcattatgaatgaggagaatttaaattaaatttatttttttcttgtggagtgataatgaataaaaagcagagaaccactgttacctaccaatgacatgctgaagttttctgtcaccacagtttcacctatagaaacttgactgttaaaaattttaaatactgtgtaatgactcttcataaaaaataaacccacaaaacccacctcttcatccataagaagaaaagtggtgtactcaagatgttaaatgtttttatgccaccacatttatacataaatgtataatatcaccacatgtaatttttatttgagtacacattgctttactgactacattttctcattaaaactataacttttgcagtatactttagacaacttgatatcttctggtttatttaacggggaatcactcatataaaatatacttaactactatacgtctgacatattttaaatttaacagttttattttactgcaagtttaacaagcggagaaatctggaagaaaccctcttaagttagtcttccaaatcaataccataacgctcaagcctgtaatcccagcactttgggaggccaaggcaggcggatcacgaggtcaggagatcgagaccatcctggccaacacggtaaaatctggtctctacaaaaatacaaaaattagccgggcatggtggcgggcgcctgtagtcccagctactctggaggctgaggcaggagaatggcgtgaacctgggaggcggaggttgcagcgagccgagagattgcgccactgtactccagcctgggtgacagagtgagactctgtctcaaaaaaaaaaaaaaaaaaaaaaaaaaaaaaagatccagcatgcaatctttacaaatgcactaagtagccctccccataactgccgggtttttacagaaaatacataacttcattctaatatgaaaaaatgattagataaacctatattgagacacattttcttttttgtttgtttggtttttttttgagacggagtctcactccatcccccaggctgaaatgcagtggcgcaaacttgccttactgcagcctccctcctcccaggctcaagtgatctcctgcttcagcctccagagtagctggaactacagatgtgcaccaccactgctagctaattttcatatttttagtaaagaggggtttcaccatgttgttcaggcaggaactcctgagcacatgcgaccctcccgccacggcctccctaattgctgggattacaggcgtaagccactgcaccccgcgaagacacattttcaaactggccaccacttttgaaaagtatcattgcaacgaaagactggaaagacggaagagctgtcaccacttgaaggagtctagggagctagaatcactgaatgcagtgtggagtgctgaattctgacatgtaaaaaatgaattagtggagaaatttcttatagttaatagtatttgttgcaattctaattttctggttttgctcatcatactatgcttatgtaagttattaactttaggataagctggtgaagattatacatacaaagtgaactatttctgacacttttctgagtctaaactcattataaatataataaatgaataagttttatagtagctgacacttctgtctcttaattctataaaattaacaagcaaaatagggatgttttcattaaaaccttatattgtttctaaaatagtttgttttatgttatgtaatgaaccatccaaagtttattcccaaaaactatttttcaggagtttggggctcaactattggtgggttagacctgcctagttgatctttctgtcaggctttgtccttatctagcagttggctgattatgtcttatggttgaaaggcatttttggccgggcacagtggctcacacctgtaatctcagaactttgggaggccaaggtgggtggatcagctgaggtcaggagttcgagactagcctggccaacatggtgaaaccccatctctactaaaaatacaaaaattagctaggcatgatggtgcacacatgtagtcccagctacacgggaggctgaggcaggagaatcgcttgaacctggaaggtggaggttgcagtgagccaagatggtgccactgcactccagcctgggtgacagagggagtctccatctcaaaaaaaaaaaaaaaaaaaaaagaaaagaaagtcactctttgtatttatgtatttttgtattcatggggtacaagtgcaattttgttacacatgtagtggtaaaatcagaggatccatcacccaaataacataaattgtacccaagtgatttctcattgtccatcacactccttgtggagaagggagctccttgtcgcccttctaagttttctttgcctattattccacactctacgtcaaggtataaacctcttttagcacccagttatgagtaagaacatatgatatttgtcatgtctggcttgtttcacttaagataatgaactccagttccatccaggtttctgcaaaaggcatgatttcatttttttttttatggctgaatagtattctgttgtgtatatatgccacattttctttatgttttcgagatgaaaacatggccgttcatactccagcaggttagctcaggcttttccacgtggtgctctcagggttccaagaaccgaaagaggaaaagtcccagtgtgcaagaatttattaatctgtatcttaaatcatttttgttaatgtcatattggtcaaaacaaattgcataactttgcccatctcttaatgggaagagctacaatattatattgcaaagtggtctacattcggagataaaaagaatatgtggccatttttcatgcagttcaccacaattgcacagtttatcttagttgtcttttctttttacttgatgatgttttcctttgtattttaaaataattatctctttaattccagggaatatgtctaatgatctttgcattatgtgtatcacaagactggcaatttgcaagaatctagtaactgctaaagaatcattaaattaatggttgattaaatgaaaaatgtattaactttaaattttaaaatcatattaacttggaagacttgacattaaaatgtaaaatatattatgtatgaaactttatttctattcaatatactacatgtaattctctataagtttcttatgcttcggtttggtcattcattgctaatttttccttctaataaatggtctactttggctgtactaacttgtcagtcttctgtgatctatgtttactgatttttccagaggcatctatgtttactgatttttttaataaaagggtcaaatactatatatcttaatttttttttttttacttttgaaataccaatcagaattgcttcttaatgtaattgctcagttccaaagacattttttgaattcctacaatgggacaagtggaatattttgtaattgttaaaatcaattttctcaatccttttaacagttgctagactaccatttgcttgttgttcaggtgtcatgtgggcaattttgctttacttttaaccatcaaatgccttagattttgccatctgtttaatatcatcttcatcagctacaaaaagaaaattaatgaattatttcaaatttgaagagtgaatattaaaagactacggagagtaaagcttacaaacaaatacaattaggatttctattaaaattgtactaaattaaactaaggtgtatttgtttttcaatattaccatataaatattaatgattttttaaaactgaaggacaggtttgtctttagtaatttcagaaaaatacttgattttgttcattagtgtatatccagcacctagttagtgactaatacattataaacaaaaacaaaacaagtaatccagttacatccatgaagtaaaataactgtggctgtcatctccaacagggcaggtacatctctaggaaatttatcacttttaactgtttatctccttcactgacactaaattgtgaaaaaaatgcctttatttgtaaacgtcttctgtccatgcataatttgcctaagcagactttaagtgggaggaaaagaatccctagatttttttggataattttctagaacattaggatgatttaattttattttaatgcattacctcttttggagtcccttttatggtcatggcttatgtatttgtgttatgcttcttcaaaagcatcagaggagcactaatttaggatagctgtaattctgtcatctctttgagagcagtaaagaaagttgtgtgctaacacaagctcttgtcctttgtttctgtggattctccacataggcttttaaaaaatcctttaccaggaaaatcaatatgtagagtggtcacttcttagtgactttgtttttataggtgataagagcataattattttactctaccttactaatgccccagacctttccatatttaagataaaaaattaaaaattaaataacttcaatttaaaaggaaaatatgagaaaaagagagaaaatatttacttttcatttatctctgtttttcttcttcatttgttttctacaacaagttcgtttcttaataattgataataacacttgaattaaccaatgtgcctctcatcaagttgagaaaataatagaaccatcagttgttttcaatttccccttcctagaatcatcagcattctcttcctgattaaagcaagcaattcattaattagtataaacactggttaccctgaaattgaacaagcttctaatacacaatcaaatccagcaatctacttagaatataacctataatcaagacagagccattgtgcatagcaagcaagagataagcagaaacttgcagcagaaatttgtcaaaccacaccatcaaagattttagagtacaaactattttttctatcaaataatgcagttacaatagcaaaatcaaagctaccatattatttaagtaatacacagtctgtagattagagtaggtaaagagctttcaaccatttcccaagatatctgtaagacctgtggatccccccagggtgtatcataacagcaggaagcatatttgaaaaacagttcatcctctacttttaaagctctcaccaatatgaagtagtacttgaaactatgtgtttttgttcttaaccctattttctcctatattttccttctacagtttgatttgacctgcatagtaaatttgttttattttgaaacagttctaagaaacatagaggactaaaaacttcaggtttatgaactctcttggatgaattctcccttgtttctttttaatattaataacaaaagaacacaacagttcagtaaaataaaataaacctgctaagttatattaatcttcaaaataattcatatttcttctatatttcatgagtacagcatggcatctgattatttatgtaacaaccttattttacacctttatctatgacaagcaacataatagtcaatactaatcaattggggaaaagccgtgtgacctgtgttagtccgttttcacaccgctataaagaactactgagaccgagtagtttatgaagcaaagaggattaattgactcacagctccacatggctggggaggcctcgggaaacttacaatcatgccagaagcggaagtaggcaccttctttgcaaggtacataattggtctttacaaccctatgctttataactacctaagtcacagatttaatgaattgaatgaaattgtaaggctagactcttcaaatttttttccatgtttgtgttttcacccttgccttatttttgtgataatataatttttgcctgctatatcatatccactctccatgatggcatccctgaaagttctaatctatactgatctcctcttttgctggaatagtaaaatacttatcatatgtgcatcaatgattagcataagtctaaataattgataatggacagaggagtttatcttctcctaaatgagggtactggcaattgataagaactctggttatattctctcaagagttttcctcatccccatacatgttcaagagtggagaaaaataaccatgcaatacactgggatatcttcattaggtatgaattaacagtcttgacttgagacctcttctaatgaacagattggcttaaagcaaatatttcactacaatattatttcaagagcacctaaacttttcatggagaaaccatgtctcatacaaaaccactgtgggaaatttcattcatcctttctcaaacactaagatgctattaattccttcttcatctcttccatccatacaaaagcttacaaaaataaaatagggtgtattttactgcttatatccattatttagttttatttactcctatcctggcttttaaacctttaaaaatcttcctttgtaatatatttggatgattatggtttttaaaccctatgataatctttttttagctgatttttaaatgtttattccaaacatgttcattgttccacttacagggcatttattttgttgtcatttgatgggagaaacactgtgagtaggcattacattttcgccagagactataaatttccccactataacaatacactacataggaaaacataaccattatatcacaataattttcgctaatttataattgaaaactccatctttcctttcccactggcccaccatcggtcaggagttttagtctaacacctaaagcacagtggagaaaacagctttttgatcgtttcagaagccataatcatttgcggaagaactgatccctgaacgcaggtcttatcaggtaaagagaaaaagacagtctactcatttttaaaagctcaaaaataataattttatgtgcctttttctccctatactgaaatttcatgtagaatatgctagtgatttcagttggcaggttacactttatgaagtggaagaatttatttattttttattttctcatattgtttcttctgttactaacttctgatgttattaaatcccgcaatgatgtttttctgcaatagagcctatggtaagtacagttcttctgaaatttcatgaagagtagcccatgagctgcttccttacataccacgcattgaacagtgttactctctccttccttcctcagggcactcactctgcattatgtctgaggggagaaactagatttgaattttgctggtcagtaaggagaaaatttctttttttcaagagagcctaaagtcctaagtattatttacacaagttcgaattattatagcttgccgtctacaaggttttaaagtgcttcgtgaacaagatattgaattacaaactagacctgtcatgattatgttccacaaagaaattgagacataaaagacatatatacttaaagaatgtatctacccacttttggggaaagaactgaattggcaaatcacctatacatgttacttcttaaaatatcttctttacaaaataaatattaagggttacattttacttcatatagaaaatatacctccaacattaaaatattatgttttctttattctaagctactcttaaaagtgtctattgttgtctggagttaaagtcttcttaactggaggccaaggacatccaaatgtcctgctaacattaaaatgatagttttctttcatctttccattggttatggtttgtttcttgaggaaacttttgtgacctctgtcaccatccaattttcccttggatatgctactaacctgatttggttgccactcaagccggatcacagaccacctagcccccatggctcctgacacagtccctgtgagagtccctgccctctaacaagcatgctgaccccaattattcttgaaattacaaaatcatagaaatggagggcagaatagtaattggcaggaatgtggaggatgggagaaaattaggtgtgattctaaaatgacaaaaccaggacccttgagataatgagactcttctgtgtcttgaatgcagtgatagctactttaaacatacacacgtgataaaattatgcagaactaaatactcacagaagcacataaataaatgtaaaattggagaaatttgaataagttaggtggattatattaaacgcggttgcctagttgtgatattgtgcacaatatcatactgggagaaattaagtaaaggcttgataagatctctctgcgatgtttatgataactgcatgcaagcctacacaaaataaaaacttcaattaaaaattcaataaacttgacaaaaagtgcatggtacactgtttcactaatgaaatatagcacattcacccacaaatttagaatagatgctatagacgtactgtaattggcaaaagtcttattttaaaaactggatttcaatgtttttcctgttatctcctgtaaacttaaagaatatcatatcttatttagatggagctgaaatgcaagaatcttctgatctgtaaacttcagaacttctggaatgtaacggaaaatattaataatgtaaatgttacactcaatgcacacaacagaaaatatgctacagctgctaatattgaaatcataacaacaagattagtaacaacaaaaataattcaacatctactaaaaatcctactgttcattcagaaatatgggaatgtggaaaaaaaatcataaaattttgaaaactcatatagacattgcaaagtgctatagataaggcatttaaatgtcacccaattgtttctttctattctataatgttgttccttgaataagaacataatttcaacatttccatgtacttgtttctagatttgctttggaaatattgtaggtacttgatacaaattttggatgcttaaaattaactctatttatattattacagctttcctggctaccaatatttaaaaaaaaacattattttaaacttagcatatcatatggttttattcttccttcgaagtaatcaataatgcattaaatttttcataatgatcataataataacaagaaatcatgcattcttcattggtaacaacctgaaaatttttggattaaatgttttccaacattgtctgattaactttttaaaaatgcttccactctttataataaaaaagcatgatatatatatttccttctcttgactttttatttttcttcatcagtaacacatattgaacaatttaattttaaaatgctctcaaatattttgccaatacatggaaacagacaaagaaaaaacatatttttattaaatgtatttttacatggatgaaaaaatactccaggacaaccttacatgaatgtaaatatagtgactcaaaaacaataaaacaatatgaattaaccaaaagggaactgaacataaatttgagacaggggtcacctgcatatatcacaaatatatatatataatatagtgtataaagtatttctgaagctcaataaatttcatataaattattttaatattttgtttgacatgagccataatgctcatgtttgtgattttttaaattaaagcaatgacagaggaactcacttttaattttatttttaatttaactattccaataaataatatagtctaagtctgtattagttttctagggctgttgcaataaattaccacaaacaggcttaacacaaatttgttttctcacaattctggagactagaattttgagatcaaggaaggattggtatactctgaggcttctctcctcagtttaagatggccattctgtctctctgtctttacttgttcaactctctgtacaactttgtctccaaattttctcttctataagaacaccaggcatattggattagagtctaccacaatgacctcattttaatttaattacctctgcaaagatctactctctaaatatggtcaaatatagtcacattctgcagttctgggggttaggacttcatcatatgaattttaagtagatacaggtaaggccataaaaagagtccaacaccattctggtttgacttccctccccaacctcccaaaacaaaataaaacaaaaaactgcaactactaatgtattcatgacacatctttcatgtcactgagattccaattctcccatttctgatactgctgtatgccctaattaccaccccagtagagaacttatgaaaacaacgggtagtccagtaaagggatatgtgagatttaacttattaataatggcttggaactttttattttttattatttcattttttttcctccagcaataaatccaaacctttggaactttttaagtgatacaatgtcatgtctatgatgttataattaataaaaagttaaaatatacatattaatacatctgtgtatgtgtgtatatatatgtatatttgaaatgtactgcttacatttaaaccctgaagagaatgtaaatggtctcattaaatgaccttttatgactgataaattatttggttgaaagaaaaatatgttctatcttatgaggaaattcatgagctatgaagagtccaagaagggataaaataaatcaatctctttagttcacttcaaataaactgttgctgaaagaatgctaaatatggcttcacctttgatgtaagggacttggcagtggagatgataccactgaaatagaagaggaatatgacaacaaaatctgttagataaaggcagagactcatgcaagctgccatttttttttttttttttttttttgagttcgagtttcgcttttgttgcccaggctagaatacaacagcgcactctcggctcactgcaatctctgcctcctgggttcaagcaattctcagtctcccaagtagctgagattacaggcctctgccatcatgactaactaatttttgtgtttttagtggagacggggtttcacaatgttggacaggctggtcttgaactcctgacctcaggtgatctgcctgccttaccctcccaaagtgctgggattacaggcatcagccactgcacctggctaagctgacaatttggaagacactgagagcattcttacttaaatataatatcatggaagatgtaagaaaaaatatttgtatttatgtatcagtttcttgttatggctataacaaattacaaaaactctgtggcctaaaacaatgtaaatttatcttacagttctagagtttctgtttccagagtgagaacttaggtaccaatacaaaagtgtcagcagaactaatatttttttctagagactccaggggataattcatgctttgtcagcttataggggcatctggcattatttagctcgttgccccattgctccagtccctgctgcctccttcacatcgcctctttcatctgctgtgttccaaaagtgttctgattccctcttatatggacacttgtgattagatttagggctcgcccagacaacccagaatcatctcctgttctcaagatcctttccttaatcatatccacaaaggtgtttttttttcttttttgccatataaagcaaccatcacaattccaggaattaggagcagaatatctgtgggggcctaccacaatctatatgccctccaatttcttaaatgtgacttcagagaatactggaaattcatcagcctacagtatctttaacagagcattttgggaacagagttagcatgtcaaattaagggctcatctaactatacataggaagctgtagacttcctgtggagcacaaagcagggatgcacatatggctatttctcacccagattagtccattctcacacttcaaacgaaaaatctgatgtctaaatatacagtgctatatgccttgctggttatgccatgagcttgcttaaaattgttacagatacgaaaatataaatagaacccattgcacttgaaaattatttccagattaaattggcttccatgtaatcagtcttttcccctgaattatcttcttcggtatgcacctaagcaatgcaaccttctcatacacgtagatgcatgactttatatttatggagattttatatacattcatcatgtctctgtagctagattgaaagctccttaagggctagaaccaagtattccgctttacatttattttgcaagctggaatagcctctattcattttttaagacagtcctcagaattcacttccttcccctacaggtctgagagagccatcgcatatattgaatttaattcttgtggtccattttcatgcgaaattcacctatacccttttcatgatactgccctaggagctcatttttgaaatgatatttgaggttaacattttccatgtttttttctctgaggacacttatttgtgtgtaacagttttttttaataatccaagacaacaagggaacataaggacactgtaattatttcttatgtaacaaaatacgcttagttaacagttcattttgttttaatttcagcattctgatcatccaagtatggtgtgagtataaaccagtaagtcatatcagccaaaatctgctctgactggtcagttcatttgaacatgccagtaaatgttatgaataccatttcctgactttaacttttgggtatcggtaaatgtcccccctttttcctacagcctgatagtaatattactttttattggttttctacagttttaaaacacagacatattgtcaaacatttgacaatcgtaggtcagtcctctctcaaaatatttatttatgcattatgtagttatgcatacatttacttatacatttattaaaattttatagtccaggaaatcccaaaatctgctaacaagtatattggatcattttgatgtttcatggatcgattctccttaactggagactaaatcagggtattcattcaccgataaaacagtttattttattacaccaatcggggatatttttagaagatgattttaccagagaccaaaatgttagtataatgtgtgtgtgtgtgtgtgtgtgtgtgtgtgttaatttcatatcgcttcagacagtaaatgagaaacaaatgttttacctcaatttctttgtaaagtttataatgcataaaatttgaaataagaattaagccatagaacaagataaaaataatctcataaaattaaacctggttataaaacactactcattctatacatgtttataaaagcactactttaaaagtgatagcacatgtgttaaatgtgatagacagtgaggtatgataaacagtatgttaaacacagctttcagatgcttacaagaatagctatgctatgggcaaataaggcataataatttttgatatgttgaaatataaattttagaatcctaaaatattaaagttggcaaatgtctcaaagtccttttcaccaaatcccattacctgtagaaatgtctcctaatatacctggccactcttcatcttacttcttagaacacgcactgtcgaggagtcctaccttagcctactgctgtcaagaaagaaaagtgttttagaggtttccctaaaacctaacatccttccccttctattagttttatctcttgttcttgttttacttttgaagctagaaagattacttaatcccttttcagaaagtaatagaatttaaacaacttacacatcggcaggtctctttgtagttctctctgttcaaagttataacctccactgtctcatattttcactcatgtagttaaatcttttattatgtcttaccttcaaacatgcaaagaactgaagaaatactttatccatttttaaataatcttatttattttaactgaatcaaatataacatacaaaaactgcccaaatgttaagtattcaatttgatgaattttgactggcgtgcatcaagtaactgtcaactaaaacaagaagtagagtatttgctttgcttcaggaagtttcttcataccactttcatttgattcccatccatttgatgcaaccactactccgctttctgcactatgaataactaaagagataacaggttcccatctgcaggaagggagaaaacttcagaatttctgacagtctttagggtagataaataacggaaaaacaatcctatataagatatcagaaaagtaatttagaaaaaaaaggaagcaaacacaaatcacctcctctgcatatttttacaatgagaaagagatatccatgcaacaagtgatttttcctaacagagatttgtaattgtaaattactgcatagtcatttaaaacaaaagggagtttgacaggagtgcctgatttagctttcctttcaacactaatcagtcctccgagtcacctcttcttcataaggtggtgggtgcctctgtcactgtttttaagcagtgtctttatttataaccatatatatatgaatgaatttaccctactgagtaacaaaatttagtgcagctttcactctgtgcatttcactgccaagaggaaatgcttgtgatacctttttagatggttaagtggagaggctcaatcatcatgacagtacaagggcaatggaattgagtcttttaataaatggttgcctcaaaactgcatctctggcaaaccagaaagtctggtttattttagtccctaaatatctctctaatcttcctaactttagttcatctgcctgaacaccacactcattcaaactttctcatttggaatattacaatagtttcctagcaaccactatcatttgtgcatgctgacctccttcctatctaaaaatgtaacttttctggtaaacaccctctactggcatgccagatccaaaatagggatcactttagtaaacacagtctgtaagaccctgcactcactgatcctggctatctctcactgcactgtctccaattctctctatgtcaaccactgcattaaatttcaattatcttatttatagagccttcccacatgcctgttgttcttatgtctttgccatttcatctaattaatgcctatgctttccttatataagtgtttaatgattaataattgcaaagtatctttaagttaaatacctttattttaaccatggtttgtagaacactcatcattgtagcagttgccatatctgatattgaattgttctaatttaatcatttgatgaatttatatgtctctcaactgaaagaacacatatgattaagttatctctaaaagctggcactatatctaccatgtagtaggcagtagggggttaatacctctatactgaattaattagtaaatctgtttttaatgaacaagacaccacaaataagccagtggtcacgagtagtttctgataaattgataaagagaaggttgactaggtaataaacttataagatttgattgcaccaactgagaatttatttaaaatagccaaagagtaaaatgtctttacattgctttatttagtagtcagtttattgactattatggacacattaactttcaccaacaatggaagtttaaacatttaatttttactatgccaaagattaataaaatataaatgattggatttcataacatgtactattatctttactgaaataatatattcaataagtgaaccacacaaggaagggtttttaaagaataatataaaatgagtatggatgaatatttagaatcaaaattatactatatatattaatcccataatatgtgtatttctaggaaggaaatgaaattatatccatggtttccctgttaagacattcaaacatgttgttttcctggaaaagaatccaatctacatatattttcagaatgtacaaatattacatgccctggtaaacagtcccaatatggatagaaaaaatatgtggaggaaaagagatactttaaaaattgatttgtaagagtcctcactgaaagtttgaatttggtgttattcccagttatgtagatattgaaatagacaggctagacagagcaaagataagacagatgtcttaaaaagaaccaagtctttcccacgtacattctgctgcctctttccttttctctgcagctcctaaggacattctttctctgcaaactaagtttaagacaaggcaaaagatctcagcattcagataatataaactaaaacataagatgcaactgttggccaagagctgtatctcatgactgtagtcccaaaactttggaaggcagaagcggggaggactgcttgagcccaagagttccagaccagcctaggcaacatggcaaaaccccacctttgcaaaaaaatttaaaaaattagctgatgtgatggtgcacacctgtaattccagctactcaggaggctgaggcgggaggatcacttcagcctggcaggtcgggactgcaaggcgccatgatggtgtcactgcactccaggctgagtgactgagtgagaccctgtgtcaaaaaaaaaaaaaaagtgcaactgttcttccaagaaggtggggacctagagtactaaagcatcactttaaggggttgccatgtcaaatttctaaaaattggtagctctaccaaaaaaaaaaaaatcaaaacacttaagaaagattctgcaaaatctcagtcatttgatgtagataacgaaccctcagcagataagggatctggtggcgtagaagctttctagcctcttagagaatgcatttagttttgttgttgtccagaaggttctattatttaaacatttttatattgttctacctcatatagtgtatagagggaatagtagttttgcctgattttgtagcgtacaaagtgtgatcgttaattgcatgtgttaagttgactaggttatgggatgcccagatagatgacaaaatattatttctgtgtatgtctgtgggtgtgtttccaaaaaagattagcatttaaaataatagactgagttaaaaaatatccaccctcatcagtgtgggcaggcatcatccaatctgttgaaggagaaatagaataaaaaggcaaaaaaggacaggttatttctcacttcttgagatagaacatctatcttttcctgcccttagacatcagagcttctatctcccacctttgggttcaagttctgacatgtacaacatgatgactacagttaataatcctgcattgtttacttaaaatttgctaacagagtaaatcttaagtgctcttaccatcccccccacacacatatatgcaccagtggtaattacaggtagtgatggatatgttaattaatttgacagtggtaatcactacacaatgtatacatatatcaaaaaattacattgtacaccttgagtgtatacattttttagcaatatatgatttaaactgaaatttaaaaaataatagaggaagaaaatggcattgggatggggtgaggcagaggtggaataaacagcttcttttcccacaaaaaaattgcattcaaaaatcattgtttataatataatattaaagtttatttcagtttatacagctcctctccttttagaaattgcatgctccttttgctccactgctacacctcattttcactaactttattatgcaaagcatatcactttgtactccctgcttcctcgtggttttccttcctttcttcactatccaagactaattaatatgttttgctatgaatcatccactccagcttctacccttcagctgtaaacaattagcagtgacttgggaatttctaattcttccttctcacgtacactaatgctctgtactgaaagggaaaagcaatatagtatttcttcccactgagatgaataatgccattccctacaaccaccccctccccaaccaccaccaccatcacatatacggaaggtagaagtagctactatcaatttaatgtcatgcagcagttccctgtccctaacttcttcattaaggttgacattaaaaatgaaataaacctaagaagggcttaagagatggacctatccatcagagagatataaaaatagatatatttgtgtaaaatatagcaacactttagcagtatgcagtctttaatatctgtattgtttatttaggaataaaagtatttatgtgaaattacatgcctgctatatatatatatagataatcagctggacaaaaacgtttcatctcccctcttgataaaactcttactagttgaagtcaaataagcaaacgttccttcttttagcttagtgaaggtcagagaaacaaataataatactagattattttccagccaataaacactttacttagtaaagacagtgaaaagcaggaacatagaaatgtgaagctgcagagaaactggttttaaaagggctacagtaagtaatacgttgtgtacgttttctggacttcatatcactatttccttatggcgttggtttgggtaatgtgaactgctagacaaaatagatccaaccacctataatgttcaaacacgaaaaaaatgtatttttcactcacctgtctaaatcttgttttcctggtttacagtgaattacctccacaatccaggtaactagatttttttctatcttctaattttctattattaagactccactgccttttttcttctattagcgttttgctagtggaaataatgagaaaggcttttcaatggcaattgcaaacataacagtgataaaaaatttcgccctactaggtggagctcaaccaccactgtgcccttggtactccactatggaacacatctatttcttaaaaatcatcacataataataacacatatgacttctatccacattccattgtctagaactagtcatatagcccaacctaacatcaagagagactggggaaataaaggctagatatatgcccaacaagagaaaattgatgtttactcaatatcctttgtaaacatgtatttgcaatttttgtttttcagattgaagttggcagtcgggcgcggtggctcacgcctgtaatcccagcagtttgggaggccaaggcgggcggatcacgaggtcaggagatcgagaccatcctggctaacatagtgaaacccggtctctactaaaaatacaaaagaattagccaggcgtagtggcgggtgcctgtagtcccagctactcgggagtctgaggcaggagaatggcgtgaacccgggaggcggagcttgcagtgagccgagatcgcaccactgcactccagcctgggcgacagagcgagactccgtctcacaaaaaaaaaaaaaaagaaagaaagaaagaaaaaaaagaaagaaagaaagaaaaaaaaaagattgaagtttcctctggagttaagactaaaagggtgagttctcatttttacatgtgatgatttcaaatacacatgtttaatcagtgtaaattggattcaagtaacttgtcttaagtttgtaaatacggacaatctcacagggacaaaacttttttccttgttttattttcagacataatcatctattttgtgtaatactgttgagctgtaattacaaaaatgagtaagataacatctacctcttaggattccttgttattgttattattcataaactgcttctaagagcttcattttaacagtaatggcttctttgaaagccatttaaagcaaatacacaatcgatttaagttctgtttgttttaatacttatgcaacttttttttctggttaaatatttgctagattgataaattttattaggaaaattagaaattccagtttatgtaaagtttttcagatgatgtaataatgtagtttttagttgtactggctcttggaagaaactgctggcttattaacttaccatgtgcatttgttaatttttaatttttttacaaatacaaattacaaatattaatgatgtacaataggatgtttttatatgatgttgaacattgcagaatgactaaatcagcctaaataatatatctattatctcacatacttatcatatttttgtgatgacaatgtatataatttactcttttagcagtgtttaagtgtgaagttaaatgcattgttatgaacaataatcaccatgttgtacagtagatatcgaacttattccttccgtctaactgaaattttgtatcccttgatcaagattttcttaattccttcaactccatccctggccccattctactgtctcctttaagttctactttttcagacatcacatgtgagatcatacggtatttgtctttctgtgcctagcttcatttacttagcatactgtcctccaggttcatctctgtcgtcccaaaggacaggatgtcctcctttttaaaggttgaatagtattctgttgtctatatactctatattttctttaactattcatctgatgatggacacttaggttgaatccatagttttgctattgtgaatagtgttacaatgaacacgacagtgcacatatatttttgacatacagatttcattcccttatactttatacccagaagtggaatggctggatcatgtggtggttctacttttaatttttttccaaaactccatactgttttccgtaatggctgtactaatttaccttcccaccaacagtatacaaggattccttttatttccacaccctcttcaacacttgttctctcttgtctttttgatagtagccatcataacaactccttaagtgcagtttccatatgtctaccgaatgtcaaacattgtgctaaatgttgataatattgtgataaaacacaaaaatttgtctttgccccacacaaagtttatattatagtatggtaaaacaatagctatcagttgaactcttattatgtttttacttaatcagaaaagaaaataagtatttattacctccattttgattccaagaaaaataacttgtctaaggtctcattaatcataaaagcaaagatgggacacaaactccaaagagagattgctggcaccacgccagtctctttatatcacctatgacggtgatttttttctttttttcttttttttatgaataaatgtaataatatattttaatacacaaaaagtggcaaaagtaaagggagaaagagacaaaacagtcatagagattttaatcttagtgaataagagaacaagtaggtaaaaatcagtaaaaataaaaaagatttgatcaaacaattttacctaattgacattaaacaatttataccacactgcaaaatacaaattcttatcaagtattcattacattcatcaatataaacaatatgctgaaccataaaacaagtctcaataaattaaaagtatttgaaattttgttctatattttctgaaaaaaatagacttaaattagaaataaagtgtgcaaaatctcccaaaatgtgaaatcaagcagcacatatctaaatggtccataagttaaagaagaaataataatagagattactataatttacatttgaatgttaatggaaacacagcatatcaaaatttgtgggatatagcaaaagaagtgtttcttatataacaaatattgcattatttttctataatttcattggaaagtaagtatattattactgtttagttttccatgcttaattttaaattactttctatcccagtattcaagtaaattatgccttatgccatgtagtcttacctccattttctaataaacctgtgtgtttcccttgcaggtagcttttaaaattttatttttcacttaaagtggagaaattacttgctgatatgtacttttttaaacaatgaagaaatagtgccatcttctgtctatgttttattcaacaactgggaataaagaaacattgggttattatacataagcaaaaagaagcaaagaatttggagacattatgattttagtataatatgctacatctttgaacacttgcaaaggggctaattatttgaaaggcctctcaggacaaaggcatgtttaaaacagttctgtgtgattaattattcaaaacctttgaatatgcattcaaacattggagaaaaaaggaaggaggcaggggagacagctgagagtaacagaaacaggtggcaagtgtttttaactatttggtgtttacagtgttgaaggattaaaaagcattttttctgtttttataacatctatgaattccccattcattgatatcttcacaaaactatgcttgatactgaaaaattctccaatcacttatttgacaagtgaaaagtcggaaaaataggaatacatttttaaatgagctttttaatttctacattaataaatatacttttatctgcatgtggttcatagatttcaaactaaagtcagaataagtagctaacataaatgaaaatatttttagatttatgaagtagctcagaaaaccaatttcttaaaaatcatatttggaaaaatacattattaggccgaacttactttcatccattgctgccctctctaaggtaaaacacaaaaacaaataaaatctatcaaataattgtataacttttactagtattgaaaaagggtatttgagttgctttaaattttatttttataatgtatcttgagaagattgcagttttaccactagtcaaacttttataaacacatcagaaattacatttaaaaaccagatcaggaattatttttctaagaaactagaagaaatcaaagacaaattaataataactaatagtttgaagcccgcttatctacaagactctaaagatataaaaacaagaacataagttaaaggcagcttcatttcacgcttcagaaagctggtctttggcacacaagtttgcttgccttgtatgatcattttgcatattcagaggtgaatccctggcggggacaggaaaacatgtgtgggtgaagctcagagtagcagcacgtcatcagcagcttgacattcttcaaagaaaaaaaaggtccttgcattttggctatatcacttacagttcacttttttgtgtaattctctatcggtaagatttattctaatggtttaaagtggatttgttacccattctttcccattctggtgtggaatctccccgatgaatctccaaatagctaaacatatttaaattcacgtaaattgatgatttttgtctgatatcaaagaagtcaatgctagacagagtttacagccacatgaaattaatggggcaactgagtatcataacttcaagaatgctggttatctgagatctgaaaggtcactggatttgagggaaaaaatctctcatccatttctaaatgctcaatgtgaggggctgctgcctgcttctaatgtgtgctaatatctatgtcctatttacattatattggggtattacatgttgattacaaatatgaaacacactatagaaaactatgcactgcatatttatttagtctatccagctcgaaaaccttttgtgtgaattaatttcagattttctggattcacattactctccaaatgcattaatgtcagcatttctttattttgttctccacattttcattatatagcattatatgaatggtgggctagtaagtggaccacttacactgatctgaaaggttatgtgtgtatatatatactcctttgaacatatataaatatagcttacatttccattttatgtgactaaaatttgcataattaccttttaactgaagacattttccaagaatatgtcaatgtagatataaatcattgtgaatagtttaacttttttgatttctcatgaaacccatcactaccattatttcttaagggatagacacagatgtcaagctactttctcaatgtcacaaaatcataaccagacataagcgttgagtccagtttttttagactgtaaccattaagctattttatctccatatgatcaataagatattagtttgcctgcctcatgtctttattctatgacctacgtttctttgaagtacatttctctgaatcagaatatttcatctatggacatttaccaaccttctacagaaatcagtagtttgtccttgccattatttccaatatactaaacagcccatgaactctatgctcagtggggtaaatatctcattattttacactcttttaattgatcttttcataattcatttataccattcatagaattctgatatttgatttagtggaaagagttcattggttcatatatctcagtaatgtccagattcgacctcttccctgttttatttctaccttttccctatattttaatctagtcagttgactgtatgtaattttaattatgttttatgtgttcatgatatatattagcaaatacatttgtcctatgtacgaggatgtaattacagcactgtactatttctattggtataaaacggagaagataccatgtaaatctcagtaaatgtaaaccttagaaaacagaaataaaacataatttccactttcaaaggtttttatgacttgagtagacaaagagaggttgacttgtgattttctcacgttggtgatgagtttttgagtacataggtaatataagtgaaactttggttttacaatagtgtacaaaaagggtgtgaaaactaagaaattggggagattggcaaataggcatctgcaattgtaggtgcatgaagttattaaacttaatggtatattcaactccataaaatagaaaactttatcaatcaaaaatatttaaatattggcaattgcaaatgatttaagtaaattaatggaaggagaaatgactcttctttttacctgaaacagttcaatgtattataggtatatttgtgaaatacagcctaaattaataaaataaaacatgataatttataggagccaagagtaatcatttaaaaagaaaacattgaactgaattaagatatttgttgaggtcagtgttgggggatacttctagagcactaaaaggacattataatcatcttctgcaggttgttcatgtatttcatttccagtaaagtgtggtcaagacttttttagtcctatgatggttttattggatctatactggtgaaaaaaaaatccttgtctacagaaaaaattcgtaagcttagaatgattaatatactgtctcattaacatagattatggaggttgaaatttaactagtgttttcttttttttttttttgaggtggaatcttgctctgttgcccaggctggagtgcagtggagagacctcagctcactgccagctctgcctcctgggtgcacaccattatcctgctcagcctcccaagtagctgggactacaggcgcccaccaccacgcctggctaagtttttgtgtttttagtacagacggggtttcaccgtggtagccaggatggtctcaatctcctgacttcatgatccacctgcctcggcctccctaataatatttttaaacacagttaaccagtttcacagtgatatttgactagaagcatttggtgtcatgttactgactaacagtatgcagataatttttctatttggggaaaagaatcagtaaggaaaggctgtagatttagtgaggctaatgtttaggagttattctttgaattttaagaaacacatgaataaaacatagaaattttttttctacactgggtatgaaatgatagtcatcttaactaggatgaaaaaaatgggaaataaaaattatatatataaaaaaacagaatggtgaaaaacattcagattacttgataagtaaagagaaacactccatttcaagttgcaaaaataagatttacaggaatgagcatttaggtatccaaaaggttctcagagatttgaacaatttttaggcagtataagaaattttattatacttatggtaaacaaatttatttaaaagctatatttgttgttagtttgtgacccagggacatgctctgatcacattttaaaactttagaaaatagcattgacattagcttgacagatggagtgagctatgatcccagaaatgactgcaacagcccagtcaaggaatgataaatgattacactaataatgttgtagttaatggagtgcaagtaatggatacaagtgataggaaagaatatcctttggatttgtccatatgttatacaaggtatgtgggaaagaaaagacttggagatgatgctgaggtttgtaactggcatggataaacaggtggtgatactgttaacgtagaagaagacaaataaataaaaagctgtgtgttttctgttaccgtgaaattaccacataataagtgtcctaaaaacaacatgacttattattttatagttgtggaagtaagatgtccaaaatgagtctcactggtctaaaatcaaggtgttagcaggattacattccttctggacattctaaaaattctgtttccttgcattttccaaattctagactctgttcatattccttagctgaagtggcctagctctgtgtccccacccaaatcgcatctcgaattttaatccaaattgtaattcccacattttgggggagggaacctcatgaaaggagattagatcattggggctgtcttcccatgctgttctcatgacagtgagtgcattctcaggagatctgacggttttataaggggccttttccccactgcacttcactctcctgcggctgtgtgaagaagaacgtatttgcttccctttctgccatgactgtaagtctcctgaggcctcaccatacatgcataactgtgagtcaattaaacctctttcctttataaattacccagtcttgggcatttcttcattgcaacatgacaatgaactaatatagtaaattggtaccaggagtgggatgctgctataaagagatccaaaaatgtggaagcaactgtggaactgagtaataggcagagattagagcagtttggaaggctcagaaggagacaggaaaatgtgggaaagtttggaacttcctagagactttgttgaatgtctttgaccaaaatgctgatagtgatatgggcaataaagtccagactgaactggtctcagatggagatgaagaacttgttggaagctggaataaatgtgcctcttgttttgctttagcaaagagactggaggcattttgctcctgccctagagatccacggaaatttgaacttgagagatatgatttagggtatttggcagaagaaatttctaagcagtaaagcattcaaagggtgacagggcttaaaagtttggaaaatttgcagcctgataatgcagtagaaaagaaaaaatatattccttgggagaaattcaagctggctacagaaatttgcataagcaactaggagccaaatgctaatcaccatgacaatgggaaaatgtctccaggcatgtcagatatcttcagggcagcccctcccatcacaggccaggggtctaagagggaaaaatggttttctgggcttggtgcagggcccctctgctgtgtgcagcctcaggacttagtgccctgcatcccagccactccatccatggctaaaaatggccaaggtacagctaaggccattgcttcagggggtgaaagccccaagccttggtagcttccacatagtgttgggcctgcagttgcaaagaagacaagaattgagatctgttacctccatctagatttcagaagatgtataggaatgctggatgtccagacagaattttgctacagaggcagagccctcagggagaacctctgctagggaagtgtgaaagggaaatgtggagttggagcccctacacagagttcccaccagggcactgcctaatgggactgtgagaagaaggctaccatcctccagaccacagaatgatagatccactgacagcttgcattgtgtgcctaaaaatgccccaggcactcaacaccagcctatgaaagcagccagaacaggggctgtaccctgcaaagtaacatcggcagagctatccatggctgtgggagcccacttcttgcatcagcatgacttttatgtgaggcatgaagtcaaaggagatcattttggaattttaaagttaatgaattccctattggatgttagacttgcatggggcctctagcccctttgttttggccaatttctcccatttggaatgggcatatttacccaatgcctgtacctccattgtatctaggaagtaacttacttgctttcaattttacaggctcatagttagaagggacttgccttgtctcagataagactatggacttagactttgagttaatgctgaaatgagttaagactttggggatctgttaggaaggcataagtgtgttttgaaatgtgaggaagatgagatttgggaggggcaagggacagaatgatatggtctggctctgagtctccacccaaatctcatcttgaattttaatcctaattgtaattcccatgtgtcgggggagagaccgagtgggaggtgattacataatggggacagttcccccatgctgttctcatgatagtgagtgagttctcacaagatctaatggttctataagggactttttccccttcgatctgcacttctctctctcctgcctaagacctccgcagccatgcaaaactatgagtcaatgaaactctttcctttataaattacccaatcttggatatttcttcaaagcagcatgaaaacaaactaatgcattggcccataacacccttccatcttcaaagtcagaaatggcaggtggcatctttctcacaatgccatctctctggttggactcttatgtgcccctcttcctcttttacaagtatcactggagtaacactgcaatggcatttccctttaagataaatgggttagtaatcttaatccctttgcaatattaattcccctttgccatagaacatgacacatccaggggttccagggctaaggatatgaatatctttggggtctgtttttctgccaaagaggcacattatagtgtagccaataagggacagcaaaagaatgaaagtagctttcaaacacactgattttaagattctggctctatagccacataaaaatttctaggaaggacttaaagagttagatacactccataatagaatttgctttcaactttttaaatcgtgccatcctacctttgcacagacactgctgcaactacataaaagcctacttttgagagttggccattttcactctctggtttatgtatattggttttctattgctgcaaaaaattacctcaaacttagcaccttaaaaaaatagccattatacctcatacttccaggtcagaattccagcacagtttggcttgtgtgttcacagtatcataaaactgaaatcaaagtgtcagtccggctgaattctcattgttaggctacatggaaatgtgtgttgccaagctcgttcttgtaggtagaatctagctccttgcaattatgagaccattcctcatccccatgtttgctgtcaatcaagtgctgctctcagtctctagaggttacctacatttcttgtccgtggtcttgcggtctccataatctccaagccagcaagaacacataaatatgtctgctttcggtctccaatttcccttctgcaatcagcaggaggaaactctatgctttaaaagggcatgtgattaggcctggatcatctccctatctcatggtcaaccttgccctatagtacaggctaaatcagattactcatgcaagtaaaatctattactttcagagttcagagaattaaacaagatgtgtacacctgaggagtggaagtcgtgaggcaatcttagaattctgcctatcatactcagcattactgcttcctcatttcccatgatacaactacttctaatctttgcacctgaaatcttgacttttgtgtctaccttgaccatggctctcttgcctgataatatcaatatctttaatccaactttatcaaccatatctgtgagcaagtcattctcctgccttctatcatccccctcccactccatagcatagagagcttggccagtcttctttttttttttcctgaacataagaaaactgcacattattgatggaatcttgagttatagccctaagtttggaattgtcagtgtagtgttgacagaagatggaattaaaaacaagggatgcaaaagatctgagattttctctggagcaagtgtagaggtaaaaagagaaaaatgtgaagagaaagaagaggaggaggagcacgtgtaaagaagggaaaggcaatagctgagaaaggaacttggaagaacccatcactcactggtcagtagctaaagacgttgtgcagacaatgtgcagatataacaacctcaaaatacttttaggttgaaagaacttaaacattgtttacaagtttgcttctttgaaactaaaaaatatttttaattaaaaattggaacacatatagatgtagtcgttcgttagaaagcatattctcaacttttcagacttagattggttggagaggtttccctgggagcctcttcctaaaaggtgacaaggaggcgtggggaagggaatagacatttgttctgagtacgacgggaaacattgctgtgcaaatgtttagagctgaatgaaaaaccaagtcacatacaggcaaaatgcagaggaaagagataataaataaatgattgagggttagaaacaaatgaatgagaattaaaagtcagctttctattcctcatgccagtgactagctaagatatgagcattttttgtttgtttttataggaatccagacaacacattttcttgcttaacgaggtttgtcagagtcgggctgaataagagttttaattagctagtagggttaattttatcttatgcttcttgaagtggaaacaagtaacaaggaaatgtaaagaacttagatactggccgggcaccgtggctcacgcctgtaatctcagcactttgggaagtcaaggcagatggattgcttgaggccaggagttcgagacaagcctgggcaacatattgaaaccccatctctactaaaaatacaaaaattagccttctgtggtggtgcacacctgtagttccagctactctggaggctgaggcatgagaatcgcttgaactaagaggcggagtttccactgagctgagattgtgccattgcactccagcctggtcaacaaagagagactctgtcgcacaaaaaaaaaataaagaaagaaagaaaagagaaaataatttagatacttagtatcctgttgaggcaaaagggaagcttattttaacagtacatttttatgtcacagctgaacagctctgtctatagcttggctgggcagcttcattatttaacagaattgtgggagtgggggtagcgcctgggtggcttcagcctgggatacgcgaatatgaggtcatgatgagaaagagagatttgattatgtgggtcataaaagtggtcattaccaacctcccacatttgtggaaatgtatctctctttccacagggactgcctgaaatgaaaagtggctctttagaaacaaggaggattttatcgctcaggcagaagcctcataaaggctgccatgagatttgcctcgaacagttaggaaggcaccttcatcacagaaggcctgcaaagctcagagtaaagtgcccatgagaaaccgcggagacaattaaccccttataatatttctgaaaggaaatatccagaatcctggaagaagaaaattatcttgtttaaatagcttttaattaactgcaaggaaccatgaaaccgttttgagtggagtcaaaaggggccatttgagccgcagaggtacttggctgtacacggcagcctcctggggagattgctttgctgtcctattagaattcttttccagggttaagggtcattttaaagatccccatatggtatttccatactcaccaagaaatgacactagttaaaattacaggaacttattttgtcctgtttatttgctatcaagtgtgttcaaaatatatattcgatgctttgtgaagtgtggcttgaccaagcttcacaggtctttacatttgcagcagtatttcgagtagacaaaagagatgaagaccagtcatcttgccccattatatattatttcatagcctctaaacctgattaagttgctctcaactgtagtaaagaaaaggactgtaactgcctacctcaaaaaggaaaatgtgtagcttttgatagatgggataaagagacatgtacaaccaatagatatggttttattgttagtataagaaacttgtgacttcagctaatattggctaaagtcattaatactgtttttttttctttctcagacactatcccaacaaccaaaacattgaactttcgtggcaagctttggtagcacacaggccttcagctattttactgtagtgcatatgttatgtgtccacaaagctacgaacaatttttgcttaaggaaattgacttttcattgtgatgaaaatccacgaggacaggagaaaaaaaggagaaaaggccaagaagaagaaaagaaatgtgtttcttacattctgaggaaaatcagcagaatatgtgaagttttttgtttagtgtgtaaatttcatcacaccattctgattgaacatgtctatgaggctaaaattacagtgtatggatgaatgtcaagtgttaccagtttaaaaagataatgtcaattctttatgaactgctgcattctcatatgaattacatttaagcatatggctttttaacttatatatttataatgcttgctttagtcttaattgtaaaattttctataagttacaaaaattcacagctgtcaaatctttaataacgaaagtgttttgaaatgctggcattaagtgtagacaaaatttttgccagcataagtgctaacgtgtctgtaaaacaaaattagaacacatgcacttttagttttttaaggaaagaaatatacatcctgacattcatattatgaaaagtagagtgataaattagtctttaggtattagaacatataaaataatgtattttgcttcaaaataaggaacaaaacacaattcaccaagaatattaaagattagaagccataatcaaaaaataaatgactcttacttcaatactccaaaactaaatacatgatgaggtctaccctgtcatttttgatcatggtaaaatcaggagcaaatatttgctgggcacccactgtatgcatctatgttaatccaggttctcttagaagcagatgctaatatgggattaaatgtgtgtggatggccaggggtatggtgattcactctggtaactccagcactttgggaggccaaggctggcagatcacctgaggtcaggagttcgagaccagcctggccaccatggcaaaaaaccctctctactaaaaatacaaaattagccaggggcagtggcacatacctgtagtctcagctacataggagtctgaggcaagagaatcacttgagccagggtggcagagtttgcagtgagccgaggtcatgactctgtacttcaccctgggtgacagagggagactctgtctcaaaaaataagtaaataaataaatgtgtttgggttttattagggaaataactatgggaaaaataaatagggggaacctggaagagccataagagcccaaagcaaatttgacccaaagtgaaaaagagaaaattggctggacccatcctggactgccatgcagcctaagaactattcatttgaaatgccaaagatttttttgagcacaagtcagctgacaaagggatcccatgtttcctaggatcttagtctctctgtcacactcagtcatccacagggatcagcctgtcggggaaaatgctttggcacagatgctgaaatgaatttaaaagcaaagcagccagggctctatgtcaagaatactttctgtagcagaaagtctgaggagcttaatctcagggcttccagaagaatattcttgatgtgagatggaaaagtacatgagagtcaatggcagaatatgttccgttactacaggaacctataatcaattttaaaacctgctgagatggttaattttatgtgtcaacttgccttggctaagggatgctcagatagctggtaaaaaaaaaaaatgtatctctgagtgtatctgtgaaggtgcctccataagagagtcacatttgaatctgaaggctgaaaaaggagatcaccctcaccaactctagtgggtatcatccaatcctttgagggcaagcatagaacaaaaaggccaagaaagtgcaaatttgctcgtttgagctgggacatccatgctctcctgtgcttagacatcagtgctcctgcttctcaggccctcagactgagctagggacttttacagcatttgatcccctgcttctcaggcccttgggtttgaactgaaattacactgctggcttttctgggcctctacctctagagaacacatgttgaaacttctcaggttccataattgcctgagcaaatccctcaaaaaagtcacttcctatatgtctttctatgtgtcttattagtttgtttttttggggtgaaacatgactaaaacacctactttgatattttccactggaaactaagttaataaaaaagctttggggcattttgtttgcatcccattctcattctatttctctgcgcaccttccatcatcctttctatgtttcaatctttgatgccaagaaatacatcttcctctttgtgttatccgtgaaagtaaaacattctctaaattttgatttttgaagcagcagaaaataaaaacagatgaggtagatacgttcagactccattcatcttggaagaacctatgtcttctgaaaagaagctgttttttggttatttttaattaaatttttaaatttattaacaaagtgccctaggctctatgttgaaagaacaaggcttcatatgaggatataactctctatacaattccactgtttttaaacttgttcaatacctgtaaatcaagtgtaagttgcacacacaggatgccttatgttggcatgagcttgccattggtaggtctgcattttcaccatcctcttagttcattctcgctttctacagcagaggtgattctacatagaacaatgtgtgtgtatgtgtggggcaagttgtgaagggaggttggggaacataacagaatcatgagtctttccattgctgaacaaccagcatatcagtgaaagaggagtggcctagagtttgaaaaaattcagaatagaaaaggggtgactgaaaggaaagggatatttagtatcaaggaagagtcctaaaacaggaattaggacatctgagttcaagtccaacttcaatatttattagctgtgtgattgttaaaagataactaaattagttaatgtttgtgtttaaaaacccaaataataattattaaagaaaataaaaaattaccataaaatttctaagaatattaaatttctgaaaatattaattctgaaattgcacgttatgcaaattaaacaagtgtattataaagtatcttaataagtatttacatatactgtaaacatatcttaattatctataaatttacattcctacaaatgctacagcttaattatttgattaacaatatagatgctttggtttgggttaactcattcacacatatgcactacagaagcccaattcaaacttaactcaaaaacacaaagtaattattagttcatgtaacaaagatgtttgtctcagggagcagtagaatcaaaatgaaaataatatcatcttggctctgcctttatcagttttgcttatctgtgcttctcttttcttccaggtttttttttaattcctgttgcagataacttttttgcctcattgagaaagatgacttctgtaaatcataaccctgtatgctaacagctagtgatccaaaatgaagacagttttccccaccatttccagcaggagagtccattggatgattctcaccatgtctgggtccttgtgcccaggtttcagtcaattgctcctcccaaagggttgcggtgtgatcactggcctagcacagcttaaatgctcgggcttgttgtcatggagaacaaaatacaaagaatgatgattccagcaagaccacaggtgaaatatattccgacgaagaatgagaaatctatagcataatttgaattgttgaaaacaaggaaagaaatatcaaaggatgccatttataggataagaataggaggtaattgaaaattcgattttattagggcaaaagctaacagtttgaaaccagtataaagcactgggtgtctgggagaaaaggaaaaggaaaggaagttgggaaggacctcaggcctaagaatgcacaaatgtcatttatgtggaaattgcaccttcaattttaataccaactgatatctgatgtttcacagatatattattattaattagagatgttacaaaattctgcctaagcaaacccatctctccagatcaggtgtatatttctagccaaattctactcctatgtgaaaggatacaaagcaaaataaaataaaatcaagaaatacgaatacccatgtcaagtctcatattctttatctttggccatttcgtctacattttccacaattttttaacctctctgttcatgatctatttttaaaagtataaaattcttcaatgcccagtttgttgacacatgtaaactgataaaaataataaaaataagaagcagctgcttaaaaaagagatcactctttcgtgctttccaaagtgtggtggtggctggaactgctttcttttgacagcctcttatattttgtccccttgttcccctacgtcgttcagtgttcacttctatagtgatgaatgtattatggacttcaaggtagtttaactctaatcaaaggaatgggagtgatcttagtaagaaactgcagtaaaccttaagtgcatgttgtttcttgcagctcattcactcacctattaagagaactaactgctcatttgttgtattttccaaatttgcccttttaaagcaactaaattataataattttatatacatttcctttctaatatactcattaccttagctggaaatgaaatacttataggcacccatataaggagagttataccttttaaatgtaagtaactatcaaagttcaaaatagaaatacctcacctatataccactttgtttgctgattaattactgtagactttgagttctgtcagcctataaaggaaagttgcattttctaaacaaaagaaaatttttttcagctttcaacttttttctgagagcctgggtttttccttgaattgaaagtagtgtttaatcttaaggtggagtggcaggagagtcattatctgaatttattgtcaaaaacaatctaaatccctaacaaaggggaaaatacattaagtggtttcagtgagatgtatgttgaagaataaatggatgagtgaatcaatagattaatgagataagtggtctctcttgctgcccagaatcctttggggtattccacaggatgctgcctttgccctgctaatcaaaagggagactatggagaccctctcacttcagaccctttgtctctcaaccacaggcccaattccaatcctccccaacgtgtgatctctggacatcaatccccacccctgtcttaggagaataaaaatagatggtggaggttttcagttgggagtttgacagtccttaagccctagtaacatttacctaaagaaggtgcaagatccattggattcatttttgaaattgtattgagccactgatgatcaaagcaagctaatgaatcatgatgatatctggtttaactaccatggtaggcatataaatctcagttgtttgtcctatgtgtatgaaacagcggtataatccaaacagtcagtaaaactaaaattctaactattttacaatctggtcattctccaggagatatacctgtattatagccttcctgggctaattttccacataaaaagattcattttaatctgattttaaggagatggatgtattttgacccaaagtggtatcagctaatgagagcaaaatagtctttagctgttatttaatgctcagtacaccttgcatctaaattaaagtgtataaagggcagttttaactattttcaataaaaatgttgtaaaattgttaagggatatgtacttaagcatagacttactattaaagccagtttaggctgagtggggtggctcacacctataatcccagcaccttgggaggccaaggatggaggatcacttgagcccaggagttcaagaccagcctaagcaacatagtaagattctgtctataaaataaaataaaataaaataaaataaaataaaataaaataaaatacaataaaataaaataaaataaaataaaataaaataaaataaaataaaataaaataaaataaaatggctgggtgtgttggtctgtgcctgtagtcccagctacttgaaaggctgaggtgggaggatcacaggaaccagggaggttgtggcttcattgagccatgattgcaccactgcactgcagcctaggcaacaaaatgagaggtatctaattttaaaaaaacaaaactaaaaccagaaaacaccatagtttatgttctataaataaaaaaaaagtagtctacaaatatgtctgatgccagaagaaagttacatcaacagttgttatggataatgtaaaaaacatcaaacctaaatagcttgacagcatgtaactgttcctcaggaatcatcattatcatcatcacaattgtcattatgagcagcagtaacacatcacagttattatgcccttactcagtatatttaattctatattttctataaccttttgacttaggtttaataaatcccatttaaaaaataagaaaacagggctgggcatggtggcttatacctgtaatcccagcactttgggaggccgaggcaggcgggtcatgaggtcaggagattgagaccatcctggctaacatggtgaaaccccatctctactaaaaatacaaaaaattagccaggagtggtggtgggcacctgtagtcccagccactcgggaggctgaggcaggagaatggcgtgaatccgggaggccgagcttgcagtgagccgagatcgcaccactgcactccagcccaggcaacagagcgagactccatctcaaaaaacaaaaaattaataaaaaataaataaaaataaaaataagaaaacaggaatcatagagactgggtaacttttctcaggccacacagaaaatagcaagagccagatgtgaatcacacatctttcttgttctaaatttcctgtcgtcaaccactaccctgcctcccacagtgtctcttaggcactcacttgacattgtttttcctgatatatctcacaggtccctgtagttttattgcattgatatcctccacggaaattctccaatttccctactctacagtctgcatttttttttcagttacatatgaaatgcagctttggaattcctcactctgtctacttagctaaagcttatggcagattcttggcacatatgttttactttatcagttttcttcagagtgttgttcttgccacatcacaaatgtttttgcttccttacataatgcaaattttcatcacccaagcccatgtattggaaaatgtagaaataaaatactgcttgagaatttgagatattataatgagttaaatttgccccacatagagcccattctctagggaccacaccacttagatcttgttactaaaatatatgaaccgaaagagaagccaaatcaggaaaaagctggttcaagatgtgcaaagggccaacctcgttagaaggatttacaacccaattacataaggtctaagagactgggcaaattattgaggctattcatattattttactagagcagaaattaactatgttcaataatggagttattagctagaccttgaaaggacaattagagatctttgttccaatacaatttgatttgtttataaagcatttcttagttatagctgccctgtcttattataagaatttttcttttgttacaagaatttaaattcttatgtttaaattttgttataagaatttaaattcaaatactagatattttaataaatatcactagcattaatattaatatttttgctaagtgagaataacattcatttttaatttttttaatgataaacattatctgaaaaaatgtaaccctacagattattttacagctagacattttacaaagttaagtactaaataataatgctttcaaattatagcactttttttgcacatcatcaacaaactaagcttttttttttttattgctgttcttataaaacctgtctaatttcgtgtgataattaattttatgtgtcaacttgactgggtcatgaggtgcccagatatctggccaagtcttattgtggtgtgtctctcaagatgttcttggatgagattaacatttaaatgggtaaactgaagaaagcagttgtccttcctaatgtgggtcagcttcatgcaatcaggtgaaaggctgaatagatcaaaaagcccaagttaagagataatttctcctgcctcattacctctgaactggaacatcagtttttccctgcctccagagactctacctaaaatattggctcttccagtgtcttgagcctggatcttgagcctggaagtacatcatcagctctcctggttctcagatctttggacatggactggaactaaacctttggctatctcaagccctaaattgctgacttatcttgcaaatcttcaggaattgtcaacttccacaatcacacgagctaatttcttatgacaaatctgatgtgagtgtgtgtgtaattatgtataagaatttatatataaatatatgtagattatacataagaatatatgtagattatatataagaacatatataagaatataggtagattatatataagaatatatacatataatcctatatacatataatcacatgagccaatttattataataaatctgatatctgaaatacataaattcacagatatatgtttatttaaagaatcctgactgccagagagaaattaaaatagaaaaaatagctttggtgattggagatagtgattttaattttgtacttcagtttctcttgcatctatactaatagatctttggtttagcaaaaataaagggggtggagatattaatgaggaaggatagttaagtcttttaagaacctgtttagacatgtctcctgaaaaattagtgcatattatgtatggaaatacttgactgctaattagaactgctgcatagttcttaaataaagactggataagtagtctggtactccagtttctatccttcatcaacttctaactcagtttgcaaattttgagattctccttaaagttttcttgtgcttcctatctctaattttgttgacatggaagaataagctcttttgattatattttttcagtagtcatgatgattagttttgaaatgggagagttccctgatcagcctcacaggacaggtgatgggctgtgtttcatctatttggtcactaccattgctcaaacctctgacaggagtggggacatgcagacaggcaggtgcaggagccagcgcactgggctctggccccacagcagtgtgcaggggtgggagcttgtgactcccatgttacaatactcttttagctctgccatccacagaccacctaagtggtctcaggtgtgtctttgttagcagtgtgaaaacagactaacggcccctctgcctttctgcaagggcagagggccagtgtgacagctttctatatcctgagcttttgtccagcaccccggaagaatcaggtcacacacagatttgaaggataaatacagaggttttctttagtggtggaggtggctttcaacaggatggatggggagctggaagggggattgagtgggcaagtgatcttctgctggatagccaaactcctctctgactgcccccagccaaacgcctctcagcgttcagacattccttctcttctctctttctctgccatgccattcccctgttcaactgcttgtcttctcacctcctcatcttctcatctgtttatctgcttctggagcctttttatgggtacaagattgcgggatgtggagggctaaaggcaacattttgggcacaaaaacaggaatgcctctcccaatttagggccacaggtctccaggcttgagggtgtggtctttgctggggaaccaccctcttctatccagtatttccctgtctcctgtctgtattagtttcatatgcacattgattgattcattcattcaaaacaattttaactaagggcccaagaaacttcagtctttcttctgagcactaacacagggcagtgagaatgagagtcaagacttccattctcaggaagcttagagggagtcaaggagaaaaacaataaatgagtgaaaaaacaaatgtatatgataatttcaaattgtgataaaatctggaaataaataagggttatgaaagaaaatgggagttgttctatttcattgttaggaaagttctttctaagaagttcacaatttagatgaaacatgaattgtataaagaaaccagtgaagtcctgaattgaagacaaagccaaacgaacaagtaaattagaggtgaatttagaatgctgaagaaacagatctcttcctcatcaggcctgatcagcaagaattcccattcatgatcctccatgctctgtctacattcaagcaatggcaaccttgaaagttatctgtggaagctgatggaggctttacttaaaatgtctagactactgatttaccttttgaggagggttacaaaataataagaaaataatacttactgtatgtgagcaagaaataatcatttactgtattgtatcactgcaattctgagatgtatcttttacattagccagaattgcctatattaatacagtcaaaaatttgggtttttattaagtgtcatgagaatatgttaacagacctcaagcagggtaagtaatatgatttggtctttgttgttatgctaccactctgctgagtggcaacggtttgtagaggaacaagggcaagagattaattaggaataagataatcaaaagctgacaatagcatggactagggtagttgctacagagatagaaggaaatacacatgttctgtgtttttttcaaggtaagtataaaagacctgaaagatagacaggatgtggaggtaacttacagagagtgataaaggatgatgtttttctctaagtttcatgttttgagcaatgagatgaatgtcggtattaatttttcaatgggaagacagaagaatacagtaaaagtgtattttttgatgggtttttgtgacatccagggtcaatattagtgtatctttgtgttgtgacccatccatagacatttctgttaatgctgggatttggaggaaggtgttaaggagaaaatcattgataaagaaacttctcaagtttaagtgaaataagacctattacttttcttacttcagtcaatataattgaacctaaaaatacctgcaaaaaatgtccttaataaaggcaatagaaaattagcaagtgtaattattaaggaaatgactgaagtaggcactaatcaggacttaaagtcaagactcgttgcaaactttgcctatgatcttcaccagttttctcaccttgattaagtctcttgccacgtctgattaagtctctttaacaataaatagagcagacttatttctctgaataagcttcttataatcattaaaaataaaaagtcatgagaaaacatctcacaaattacaaaacactataaaatataagtaaaagtttctattacttttaaaataaatactagaattcaaagtaacttccagttttttaaattaacatgttgtgtttttttgttgctaaaatgacatttttaccatgaataattgtgtagcaaacagaatacatgaataatgggtggaaagcatcaatgtaatttcagaaaaacaaacaagcaaacaaattaactatagcatttcccagaagaatttccatggacatagtgattttcagagttaatatcttttggaagggtgggaaaagcttcaaggtgtaattaattctatacctaagtctcaattttgccaaagaacaattcatgaattaacatgaagaatgtacataactgatattttaaaaaaataggtagaaatgcatacaatctattttataactactggggaaaaatacctttgatttaattttcaaaaatggcctaatactacagacataacaaagcattgtgaagagatcatacagtgcatgcttggtgtgatcaatgcaagtactaatgttgcttcctgtctgataaagacagaggatacacatagtaagtaaatgaatgaatcaatgcaagtactagtgttgcttcctgtctgataaagacagaggatacacagagtaagtaaatgaatgtggtaattgtgacaatacaacggcagttcagaatccaaaatacatttcaaaatatcagaagtttacagttcaattttgaggcatattttatatatctcaaagttgaattgtggatttgtggattatatacctagcagagagtgaaagaaaaccaacaaaaacaaacatgcaaaacaatggacctgtcttaacatccaaaatagctccccaaacccttttctggtgttcacacccttgactatggactgaacttcatggtgactcactgctagcaaataaagtgatgaattcaaaagtaataagatgtcacttctgagactaagttacaaaaataattgtgtcttctatcttcctagctatttcttccctccccttggaaccctgcctctggaagaagccagcaattatttatgagtgattctatggagaaaccaggcaacagccacacgagtgagctcaaaggggatctcactggaaatggttgccatcaatactggaaatggctaccatctccacctatgtactgatagcatcctcaggacagatcttgaattcgagccaccctgttaagctacacctgagtttttgacctatagatgctgagataaagaataattggtgttttaagccactatgtgttagggtaacaatttattacttacgataaataacaaataatggcctttttagctaaaaccatctaatttactgtaaaattttgattttaaattatcttcacaaaatgcttaagaaagctatatatatgtgtgtgtgtgtttatatatgtgtttatatattcatatatctttatgtatgtataaaccaatgtttatatcttaagctttttgtgttcctcaaaatctgaaaacaaaattaactgttttatgaaagagaaaaaaggcatacttattatacagaagaaaaattggtaggcaactgttgacactattatgtgaacaacagtcatctttttaagacttttaaaattattttgaagaagatattttcccctaaacctttcagtttcaaaaggttttgaatataaaacaactgctgaaataaagcattgacatttaaacattaacagagcttcaaaactctgttaatgggggaaaagttgtgcatataggctaatgtcaggagtgcaatattcttgctaaattctaaaagcagctttctggtctaaatttagggctactggcagtggatccaacgttagatggggatttgagaaaacagttgtttcagccacacatataagccaggagagtgttggcaagagtaacttccacacaaaaccatgacagagaaggaaacaaaaagattcctgacatttagaccagttggagataatgtgtcacaaacaagtaactacaaatacatgtttctaaacaaggcagtgataatttctcaaccagttggctgttaaaacaaactctgctgttcctttctattttccttcacattctttgcgtattggtccttccatctggcttacttttttggacccagatccaggagggcattttcccataaagcttgatagaggataagctgcaaaagcaatctctgtacatggtaattccagtagtccaatgtgaaacacggaagaacaattattcagcccacatttgtttccctggcagctctctgagacctctttttataaggtcactaattccattcatgagggctccaccctcatgatctaaccaacaaccaaaagcccactttcaacatgttgtcacgttattgattagattttaacatatgaattttgaagagacacgaacatttggatcacagaaggaagctttatatggcagttcaaattcaaattctggacttggacaacccaaacacggccccagcatgacttggcaatcactttctttacaaattgaggtgttctgatttttcagaacattctgattattcagaaataatgaatgtgcattactgacagcatcagaaagtagtaattataaatgttaaactgcatatatttggaacttatatctctgtaaataatatgtaaccatggaacatgatagcagttcctaaagtttaactaaactagcttacgatttataaaaaaacatcaccctatcgaatattttttatttagagattgagcttttgagtagcacccccttacctcagctttataaacatgttcctgaatatgttttgaaaagtctttctttaggttttgtcaatacctacatttattattctaatttatctactggttccagctcccaaaatggactgagttagtagtttgaatttaaaattttaactttatcatgattaaattatttaaaatgcaacaatttcaagttttggtatgtgcaaaatacagtaatagaggttcagtgcaaatccatacagaggaaatgaggatgttagccagctttgttaaatctgtaaatgtgtttaagagctttctttatgctattgttcccccatgctgtggaagtccataagcatttcataaacctttatctggacaaaataaaaaagcaggccagtagtcaggatcttgatgtcatgctcaataaggcaaagtgtgaggaaaaagaaagaaactaaaagctgcaagagattgtgctgagtgggaaaatacggcttttcttgttttgttactcttcatttcaacaaggcatactgtgatataatttaaagtggaaaatcgatgtgggtaaataaaactttttaacttttatgtttggattttatatttgagatttttcatttatttactcagtaaaaatagttgaatgtcaactatacagtcaatccaatgcaaagcccctgaaggatagtgaatttcttttacttttaggttatagacaaaagggttgcttgactgcagagtgttttattccccctaagagtacaagaattagaatatgtgttttggaatgtgaaccatggtgaagctaagatgtgtcttcaataaggagaatatatggacctggttttgtgaacagaatgatgggttggtttctgggtcttgagagtaaagaggaaagagaaaaaaacagtggtgatatttcaggaaacaagctacattctactaaaggcagaaactgacttcccagtaattgcaagagcacagcttgagattcagagagcttgaaccaaagtattaatctgagcacctggaagaccatagagccaattgagttgataccaaaacctgcaaacaagagtactgtatagtccttcggttagcatattcaacacaaattcttatccctatgccaactcttaaccatggaggtagctatttaaaatattttccgccaggatttgcagttttaatatctaatgtacaattaaatacttattaattttactctaagtttcagttgagagtttacacaggtaaggagcatttggatattcgatgtatattttctgagatgtgattattgttactctagctaaggagagtgtttctccacaacttactggtgtactaacaaagccatgtttggtgcttccattcttagtggtgataatgactttgcagggtttctccctctttttcggtttctccctctttttcaatttctctgaaatctggctcacttaaagtttcattataattattagataaaaagcaaggtagtcacttttcaggaaatgaaagatttctggtattcataaaatttaagtgtcttggcagatattaaggtaacatttccctaattattattaaattgaatttttctaagccaaaatgaccttaaaataaggaaaacatttatttgctccaagtaaactttctatgccttatcacaacactcttctccctttaattatctcttgacatgcccagtaaggtcaagtttgtcagaaaacttgcacggatcttttttacatttactgatgaaggcattgcaaacattatcctagcaggaataacagaaactcaggatatttttatttacagggccccctgtcttgaattcctccttctacgctgtgctaaactgctaatttctcacttcattccatgactttatcaagccttaaactgagtaaattgtgttcattgttttagattcaccttgatgtgcacagttattcgtgctggctctggatccaatagaccagcaactgtgctcatttaatcttggcttaaccatttctggcatctcgcttctgtcactggccagtatctcttactggaaagtctcccagctagacatgatctgccgaccagtctaaagctatcatctgatatgtttcccaagtcctgaaatttttgccttctgactctgttgggctttctttcaatactatgctatgctttacttgtaacagcctttgctatgagcaaatcaaattatcctgtttctatttctctgtggtcctgatgttacctaagaggtaaaatttgtaaagtgctaattacttcatacaggatcagagagttagagagtcctatgggaatttagaattccccaagttccgttgtttccagaaaactggagctattacttgttcccagtcacataatttattatgactaaaggtatgtctcaaaaacaggatgcaaggtttcagtctatttttttctataatactacactgaagtaatataatcacattaatagtcatgcctgtaatcccagcactttaggagaccaaggtgggcgatcacaaggtcaagagattgagaccattctggccaacatggtgaatccccgtctctactaaaaatacaaaaattagctgggtgtggtggcacgcacctatagtcccagatactcgggaggctgaggcaggagaataactttaacccaggaggcagaggttgcagtgagcctagatcgcaccactgcactccaacctggcaacagagcaagactccatctcaaaaaaaaaaaaaaaaaaaaaaaaaaagaaagaaagaaaagaaaagaaaagactatccagtatattttagtctacatacggaaattgagccactattagaaggggtttcctggaggaggttcaggaaaagccaagaatctcttgacaacttatttggtgtcatttattcaactgtcagtaagcttggaaaaataaaacaagtattgcaaaagaaaaaaaaagataatattgagaaatgataagaaatgccaaaaacaagttgctaaattaatgtacaaataaatgtcaagtatgacatttgttttacttctttcttcaataagtactactgtaagttgctgcaatgtcttcatccttctcagtagagctgccaaaagtctgataggtctccactcacttttacttatttcaagacagcagtcatttgtttgctaattccttaatcccattgtgattgagtatctctgaaatgtacaggcaatctttattttgtttagttgcctcagaattaaattgccccaggtatgaaaatccatgacacaaataatcaaaagtaagagagcagagtgtcctcagatgtcaccaatgcaaaaataggcaagtaaaatctgtgatgggattttaacattcacaaagcactagaaaactatatatcagaatttgtgtaactatctcaatgacctgtcactagctttttttctggagatttcattattcattcatccaattatggcaaaggaagatattctactctctcttaattaaaactgaaaatgatacattatatgcaaatatcattctacacacaaatatacacatagacactcatatatactcatgctcacacatacagtcatcacaaatattgtgcttacagatggtgagagtacgattataaactaattgctttagaaaggaaaagaagaatatcaaagtgtgtgctggaggttgtgtgatccaagagagaagagaaatggaaaggaagctggggtggtaggaacgtatttaatgagttctgatggggtggtggggatgggtgatattgtgcttgtcactatatatgagttatttcattcaattatcaaacgtgtttattaagtagatgttattatttttgctttaaaagctaaatatcaaagatgttaagcaacacagagccaaggtaccacaaatacaaattacctgattcccaaaaatattttttgtcaccatgttggttctaaagcctactagagttatatgctacctaactgcctgaactttaactttacattttctttatttcttttcttttccttttttttttttctttctgagacagaatctcgctctgtcacccaggctgaagtgcagtggcatgatctcggctcactacaacctctgcctcccaggttcaagctattctcctgcctcagcctcccaagtagctgggactacaggcacccgccaccacgcccagctaatttttctatttttagtagagaccgggtttcaccatgttggccaggctgttttcgaactcctgaccttgtgatccgctcgcctcggcctcccaaagtgctggattactggcatgagccactgcgcctggcctaattttaaattttcaaatttgcagtttgttaaaagatctattgatagtatctcacccctacattagctcaatttcgtcttcttatgtgtggcaactttctctgaccttcccttaaaaaccttccctagaagttttgactgtaaccctcttctatttgcttttattcactctccttcaaagcgttcatatccatgtagctagttgtctcttaaatcatgaattcaaattctttcaaaattattactctgagttactgtctaacatgtttcttgcaaataactcaaattttatttgtccaggttttgctcacaaacactccaatgaagcctaattatatctttagacagttgatcttaaaaatgcatttaaaatattatttagatttttccctttattttcatttctgcaagcatcatcaaggtcaagccgttatcatagcttgagttgattgaaataaatctcttttttctagtcattctttagctaatttcttctactcaacatgattcagttggtctgtcaaaatatatcacacataagtacaatatttcttttccaaactttctgggattccttcttgcttaatgttaattccaaatctcctatcctggcattaaaggccttctagtcttattcacagtatttcttcacccagaatactgtgcctctttcattataaatcaatgttttccatttgtacatgtccaactgaaaccccatctcctccctgtctcgcccagccaaaaccaatttgctcctctgctctcacacagaactttgtttatacctgtcttatgtagtcattaaatgctttcttagcgaatggatgttggattctctctcagtttgtttgggttgtcataacaaaatatcataaaccaagtgacttataaagaatagaaatttatttttcacagttctgaaagataggaggctcaagatcaaggaactggcagatttggtgtctggggaagacctgcttcctgcttcaaaaatggcagtctgctctgtgtcctcacatggtagagagagtaaccaagttctgtggggatttttataaagacattaacccatacatgacgcttctgtctcatgacctcagtgaaccctgattatctcccaaagaccccacgccttaataccatcacattaggtggcagggtttcaacatatgaacttcggaagaactcagcatttgtaatgcaagagcttctactctgcaacatacttaagggaagcctctctcagatggattttccctacatcttgtcattaacattaattgccctgtttaggttgggttcaccagacagcctgagaaaagtgatgtactgagggagtactttcaggtaaaggatgtgtgatcaaggggatacaatactaagcacacatgttgttttaactgaagattagattctatttgatcccacgaagagctctggagtacaaatcacactatcaagttcctgaccaggggtcccctcctactcttggaggcaggggtataacctcttccagaatgaggcagttccctttgggctgtaggtaggctccaaagaagatggcagctatgtgttattagcgtagctaaagggtgtatgcataaacctggcaaggtgatctggccaggacaccaataatatctataacaatgtatcttttgcacattcagatcaacttccttttattaatttcaacttatttatttcattaagtttacttcataaagacactattttttctggattttagttaattacagtttctaggaaaactcgcaaaagtagagttcatgggtcaaagaaagttccctgctgccacatttgatcttgaggttaaaaatatcatctccctcctccatgtctcattctaggttccccttctcttggctaatgtttctggtcttctggtgttctggcatgagggcttctaccatagctttaagtttaacggaaatcttactatgccccctgatggaagggttgctttatgacaaccaagacctggagctgtacagagcttaaaattcctgggactggatgctcagacaggtgaaatggatcattgagatcactgagagtgacgctgaatcaaacacttccactcctaccccttggtttccagagctgtgtattcttcctcttggggaaagatcatgacacaacgattgcttcgaaggtgttagcttcaagtgagcagcacgtatgttcctttaagatgtcatttcacttttatggcaggctagcagcttttaggtaaatacaggaaaggtaagtctatgcttccagtagctcaggccaaatacaaaccataatctttgactcctgaatttctttcacatactctaccacattctattggttatgcattcaaaatatatgtagagtctgattttctcagtgactccattgttaacactatattttaaaccatagtaatctcctacttctaggccattaaactggatcttgtttattttgtctttgccccaccacaaaactacactcccgtgaataggttttattaagaatgactctttttaaaacatgcctgtctatatcactcttccgctcacaccctgccaatgacttttccatctttctcagaaaaaaatctaaatattttcataaaagtttgcaaggcatacctgcaatcaaacatcttatatttaaatccacctcttactatttgtgtgaaacagacaggctaatggaattatttgtgtctcagtacagtattgagagaattatgtgagttggtgtatagcaatatacttataatagttcctggcactgaaacaacactacataaatgttagctaatattttcattgtttcagttcttattattgcaggtgtattttgtgcttgtatttttatgaattacttaaacataaatatttttcatgtcacatgataattctcagatacatgatatctaatggctatgtaatattctatcctatattatgccatttttatttctttcatctattcattcatttattcattgaatcatgctttctaatcgaggtattacagaaactgcttgaactcactttgaggaaagtaagtctatatgagatagaaagcaataacgcaagccaacacatgcataaaatgtatgattgaatatgttcattattttatttggcaattccaccaaaggatatactttttcttcctcacatgtttaaatatttaatgctatagcaaaaacattatctcaagaaactttctgtgcatatagggaagaacacagagggatccttatccatccctttcttctatggaaaatgctgggcataaagagagaatagagtccaagtagaggttaaatttgagttctgtctatgtaacctttacttgtgtcaagggtgcaatgtgtagaaataatgctgccatttgtagagtccagtcacttctcaactaccagtagtcatgactaaacagtaaattgcataaacctcaaaagacatcagagactaatatatatgaaggatatcagtaccgtatgttccactggtcacttggtaacatggaaacagaaagagtaaatatttcacagatggaacattcagcaaatcctatgaaaaaaattcatatttatttttaatcctcaaatatacggtcattttaaacaattttatttcttattttaatggctacctaatttcctttaatatcagagaaaaattaaattaaattctattttcatcgccaccctctcacccctgctgtggtttacctctttggcattttattattgaaaaatgcctacccaccatatgaaattatttatccaggactatagccgaagaacaataattttaaaagctacaaaacattataatactaaaaacacacgaaatagattgtcctcctttttaatctcatagtgttatcaaaaaagtattaattttcactgagactcaggcaaaaaatattttttacttttgcaagagcatattgtatttattgtccatataatactgtcttaaacacgttagatttgtttactatttattcccgtaaaagcagggaattggaaaccaaaggaaatcagacctttaaatcctctcacctaatgtgagccatttttttttctgagctgagggaaagaaccatcatataataaatcgaatcagctgaaagatctctcttcagcaagtaagctgtatatagttggagtgtgaaagacaagtggccacagaacagtccctacgcctggaaacttaattaacttatattttaccatcataagaaacaaggttagggtctctaccaagctctgctatacacacacaaccccttttaccaaaacctctgagacttgatctctggcaaacctggtttcagagtaacacctcccgtcgtatctttaccaacatgcatataaaacattttctcattatattttactctcataatgcaataaaatcttttattaacctttacttaggatataagattatttgagcacccaccgacaacaaactgagtgtagcatctctattttattaccacctaaccactcgtcattgtggagaagaccaaggttttcaaaacccctcccaactcaccatcatggtttgtggaaagtaaatctctttccactcaggtgttgtgatatgaaaaggaattaaagagagagaaatacagcgctgggataaacagcaaaaatgagaacaattttaatctgttgtgtgtgaaattaaatatcatgtatcatttccccattagacaaactatgtccagagtaactaaatatagttttcctgattgtttctgcttggaatcttacccattcagcgcttttttcttttacatttgaggaattaatttcaaactttaagtttcagcttaccaacatggcacatgtatacatatgtaacaaacctgcacgttgcgcatatgtccctaaaacttcaagtataataaaaaaaagtttcagctgatatattgtgtaataagttattttaatagactttaaaaagctcaattttcattcaggggaaaaattgcataagagtactgaagatatcttgaatgccaagaagctcttggaaaactaactttttttaagtaaaatgcagaaaaacagagaaaactcaaagccaataaattgggcacggattttaaaattagaagccaccacacttgcagaagcagtataaagtttttaaaatctgggatgtatttaatagactcaattattttccatttaaaattttaatattttaataaagctaaattcataggtagagaaatattattggcattggtatatggaaaaaattattgtatgtacttgtatgttgcagccaagtacattggtatatatcacaactttaaaggagtggagggagctcagaaaatacccctgttttgtcatccaaattaaaagtgccaataataagcacagaaactcacatccccttactaatttgttggcagttttcccagaaacatattttatgtagataagtcttcactttgctcatacatttcattatataaattatttttacaaattaatttttcattaggcagaagaatatggttcactaagtatgctgaaatttactacattatttgcatctgaggaatatatgacatgccactgacttttactaagacggtctaagcattagagtgtgttatggtcccccgtgtgaatacatttctgaaatgtttccaacacttatagcctggcattcagcccccatgatgatctagctcaaagacatttgtagtcttatcctgtgctattcctctttacatagtagatcctgcaaaccagtggaaccattgctattcactaacatgccttttgcactttctattcttcttttatttgcatctgtcattttcaataattttgacctcatgaccaaaaattatctttaaattattgaggaggatccccccaaaaaatttatgtaggctgaatctgttaataccaggctaaaagttaaatgttttacaaaatagtattttaattaatacttcaaaacataatcatgatagatctattaaagttttacataatatatatatatgtgtagtttctaaaacaaaataaaatagtgagcagaagagaattattttacattttagctacttttatttttttattttttattttttatttttttttttcagacggagtctcacacagttgccaggctggaatgaaatggcatgatctcggctcactgcaacctccgcctcccaggttgctcccaaagtgctgggattacaggtgtgagacaccacacccagccttttttttttttttttttttgcaggtttctttacaatctggtttaatagtttggtttaacagaagacagttaaatactaataactgcttttgcattcagtctgttgtaatatattgttttggtagaagtgtatgctgaacattgagcatcacacagagaagtattagaaaaggcaaaagtattttaaatgtcttttcaggtaattgtgcatatttttcttcaacattacaccaaactctacaatatacaatgtgaatttttttccctctggcacattaaaatcctctggtttgtgttgtactttgaataggtttatatccattcatgattttgtgccataaggaattaattatttggaaaatattgctttattaaactatgctgatctgacaaatgttggaatatttcattataaacatcttttaaaatcatcttattaatgacctcaccaattttgtcaaaattatctttaagtatttggaagctgtaaacctcctggtagcagatacaagtttcataaaattctatttttttaaatatgagttttattattgtcaacatatttggctagttttctttgaagtgacagtaagtattcaatttttaaaagtctccgaattgatcgtgccactgcaccccagcctggacaacagagcgagactctgtctcaaaaaataaaaaaaaaattattcgaatttagtttttgactccttttcttctgtatccattcgcactcttgaaaagacattactcttacagttttaaaaatcatctatatgcttataactttatttatttatttatttattgacacggagttttgctcttattgcccaggctggagtacagtagcaagatctcggctcactgcaagctcctcctcccaggttcacgccattctcctgcctcagcctcccgagtagctgggactacaggcacctgccaccacacccagctaatttttgtattttttgaagagatggcatttcaccatgttggccaggctggtctcaaactcctgacctcagctgatctgcccacctcagcctcccaaaatgctaggattacaggcgagagacaccacacccggcctgcttataactttaaaatgcatatttttagctcatcttattcattttcaaggaaatgcatgatattttcttgggccaaaatttatgtaccgatgattattttaaacaaaaattgtttcttgaaaaaaaaatgtctagttcagctcacactcaaaccaacatacaagtgctttgattcgaagaacaacaaaaaaatgtattttgataggtagcaggactttctgttttgtcacaaaatattaaaaagacatacactcaagtgtagagatttaatggtatggataattttattttttactgttttattcagatgatcttaagctcttgtcttgttttaactttggtggtgaagaataaaacatcaatgagtacatcttgataccactgtctatttgactgtagcatgagctgctttattcaccattgtttttgcatgatcatgtcaaatgccaacacattaaaaagggcacaaaaccatttagtattattgtgaattaattcttactttgcaaactccctgaaagaatcttgtcgaccactggtgtccatggtacatactttaagaaccaccgacttaactattttctgtccctagaatacacatcatgacagttttttgaggggaactgtcatggaaaataaatctgtgaacttgagggcatatcacatcgggttagttaattaaagcttagccacttgagggacagaggaactgccattattggtttaagtaaactcatattgcaagtgatcatttaataaaacaatattagtgagtgtattcagttttggaaaagaaatagatgcgtaacgcatgaagtagccactttcaagagtgcaatctaaattcccctcaacaatacttgctctttcattatttttaagacaaattgcaacattcagtttactgaaacttcatcattttgttcataatttaattcaggaaacatttataagcagtaagtagtttcaccagacactttgctaggacctcaggacacagagtttatgcactgttcatttttatcaacgttataaagctggtcttaggttgctctatgtgatgacactcccattgcagtgaatctgtcatcttctgccaaaatcagtttttgctgaaagactcactgtatagtatagtagccaagtagaagatttatacatatatttcatttatcaaaaagtagtgaatatattcaatatatgtagacacagtctaggagaaaaaaagtctgtagtgtatatgtcttccttttttattttatttccaagtaagtagtatattcataaagatgccaatttgacattccaaatttgacatttactacagacttcacatagcttttctcttttctgcatgattccagtatatatcagatctatcagaatgaacatttctaaactcagagcacagtatcatcagtattttcccagttctcaggtgcacagctggataaatcactcatttttctgtttcaaaaatcacttcttttaacctggttgtttcaatgtatcaacatcagtcatccttaatcccccaaagataacattaggaagaatgaaataaaaaggagactgtaatccctctctttcatatctctattttgagaatagggaaatcactcgataccacaagttctatttggaatgtcacaaagtagatgtagcacaaaaatatatacttctgatctgtaaacagtaccagctaaatccatattcccattaatctcctgccacagcactgcatgttctcttcatcatgcagccaggttattctaagtctcttagcatagcttccaagaatgtacatctgtcatttggagctgagcaacatgtagattcaccatcattctgggcaattggatcttggtaacattactgcatttcttgagttggatgccaataaattatctttaaatgactttcaattatctgattaggtttagttcccttaaaggtatgcctttctgctatgagtgagtactgcccttaagctttaagtgaccagcctgagtacatgcatttggtacggataatgcacttgatctttagagttggctttgtggcttttggcaatatttcactattatgcctaagtgtaagcagaataacattagatagatttattcatttttgaaattgctatattctttggtaggtaaagaaataatcctcttccatattcattcattcattcatatacataacctgattgtgttccaagtaagaaaatttcacttaatgctatcatttcagtctaattatatcagtctgaattctgtatatacagatgtctactgtatcagttcatttcactggccaagtatctttgaaagataaatgtttcattatcacatccaaattaggaaaattattcctttacatacttgaattcatacatgcagtataaaatatttatcaatcattgttctatatcagaaactgtgcttcttatctactaggtattcaaagatgaatcaaatgactttccagtcatccagcaagttgcagtttattggacaagatagatatataaaccaatacacctaaggaatatgctataaaatagaagaatgaattaagagtactgtgaaatactaaaggaaagtactccttctacttagaagacatgaagtctttcccaggggaggtgccacaagctcctaatctcattatttatttattcattcatttgtattgaataaatagcttcagtttcctctttaattatatttcatatataatagtacaattatattttatatataattgtacaattatatattatatataattgtacaattatatatataattttacaattatattttatatataattttataattatgttttatatataattttatgtcttctttaattatatttatggggatgccccatattcaaagctgaaggttgaggtttatttatcctcaggtgagaggccaaaagtcagacttaaaaattatctgtcattcttcagttttgaatttcaaagaatacaactgaccatgttagcaagattgcagtaataaaaatcaagactagtggaagaaggggtgttacttaaggtgataatgcaaactcaagatctaagtaatgacgtcactacatatccagactagaaagagaaagaagaacaatgatagaaagaaggtgaaacagcatgagacccctccactcagcacacctggagtcgagtttcaagaggggagtcatggcccggcgcgtggctcacgcctgtaatcccagcactttgggaggccgaggcgggcggagcaggaagtcaggagattaaggccgtcctggctaacacggtgaaatcccttctctactaaaaatacaaaaaattagccgggcgtggtggcgggcgcctgtagtgccagctactccagaggctgaggcaggagaatggtgtgaacccaggaggcagagcttgcagtgagctgagatcgcaccactgcaccccagcctgggcgaaagagcaagactccgtctcaaaaagaaagaaaaaaaaaagaggggggtcatttgaaacattcagttaggtatgtgtgaagggttgggtacaagatattagagatggaatagccggagtcattcctcatggagattaaaagaaaatgctgccagacgcttacatgccaataaggcacaatataatggtagagcagaagttgttggaggcagatagatagatgaacctcagaagtaccctggattccttaggattttcagaaaacctaacggaatctgaatatctaactgaagggatgcaggtttccaggaagtctggtagattctcaaagactggggtcgtgacaaagagaacatcatcagcagggtgtttgcaaccaagaataaatagctgagaccacaggctcctgccatgggtgcaagcatatcagctcctaaggctatttaggacaaaccctgggtcagcccacataggaaaagcatcagattaaccacccccctgagaccaatgagaatgagaggtccctttatggactagaagaccactttttcccaaatgccaatcaggactcaaattctttacacgcatagccaccgttatggggaggagatgataaaatgtgatgtgcatggcataaagacaattagttatttgaagatggtattaaagccagccctggtagggcactaagcagactgaggaattatacttaaaaatgaatgaggaattcttaaaatgcaggcttaaatctggctattaaccactggaatgacaactcttaagaaagatcaaattagtcataaagaataaagaagctgcactttattttattgatctgaaggtagaaatgaatctgtgatatcactttgcttttattgaacacacagtttgagcagctggagatacaatcaatgggcaagatatttcttgtggatcgcagattgaagtgggaaatgtagacaaaacaaatacaataaggaaataagcctgagacttcagggtatcttatgtgagcatatatgaggcatctaatcaaattttattattttattttttgagacggcctctcactctggcccccaggctggagtgcagtggcacaatcttggctcactgcagcctactcctcctgggttcaagtgattctcctgcctcagcctcctgagtagctggggtgataggtgcccatcatcacgcccagctaatttttgcacttttagtagagacagggtttcaccatgtttgccaggctggtaccgaactcctgacctcatgatccgccttccttggcctcccaaactgctaggaatagaggcatgagccactgcgcccagccctaatcaaatattatgagtaggaggtggccaggagatacttttagaaagttatttctgagaggagacatgcaggagacatgagagtagacgtggagacctggcgccatcagactggtctcagaactgtgagtacgtagactgctctgtctcgtgtgtagtcacttcattaaccccatctagaaactcactagaatgcatcagttcttgagccagctctcaagattatccagttttcctcatttatctaaacagtgtcaacatgaaagcaaatcagacatattgattgaactgtctaatttattattctatcacagagaaagatgtcaaccagctggaggtcttgcctgtgaggacacagcgttctctccttggacctgcccagttcaacatgttcatcaataatcacaatgaagatacaaagggcgtgatactcgactcatgacaagcacaaggtggagggatagtgaatacaataaaagacagacacaagatccaaggacttgtaacaacctggagccatttcacagccagaaataattcctcaactttgattctaaaacacacaactatacaagtcaaaatatcacaagataaatcttagcaggatcatatgaaggataagaataataacaaaaatatgttaaggatgtattcaatagtatatgcaatgaaagccgacagtgtgactcctgtcagattcatttcatgtaaacttgtgactataagtgtgatatcagcaaggaagaaaccaagcccttttatccattctgtttcttatgttacatttggatgttatgcacttctgggctctaaagttacagaaattgtaatatctattctgttaataaatgtttcataggtgctttctatgtataagtaattgtgtcattaatttgggataaacagtttcttggtcttcaggagacggagttaatagtctttatcagtatgtatccaggggaagttaactatactggacaggtagaggaagaagagttcagtacagttcaaatgcctgtgaaatacccgagttaagatgggagttagtggcaatttggaaataagtttgcaggtgaagttaaataaccaaagatcactatagtgctgaagggcttaaacactgaactagtataatattattttaaaaaattattctgtttatagctgtaatatttttctttcatttatgtacaaagttattttaatagaaccatgttatttgacaatggaaaatcgattcataatatcagtaaacatacttttaagatttgctctcagtttcccatcagttagtgggttatgattttaatgctgtgcagtgggggaacaaagcaaatctattaacgaagacaatttgtgaattacaagaagtataaaaacctgacaaatttctccgtttcagtctacttccatcaatcaccattaagtcaggaaaatatactcaaagacttttacatcctgggtgaaatttccccagtaccacttagtaaagcaaaacttcacaatttaaaagatgctatattgttttcctctaatataggagcttcttttgaacatttgtgatattattattgtaacattattttaacaaatacgcattcagcattgttaaatgctagtaactttgtgagttactgtggatacaaaaaaaaatcaatctgcccttgaagagatcacatcttggtgtcaaaaaaacccttatgatctcaaatgattgcaatataacataataaactttatcgatttatttacattcctaacactgtatctcaaatgtggtaagcaataaataattgattgtttaattggactgaatataaagtccctttgattggaattcaaagtgtgtgctatggatcctggattgaaaacctgctgtagacatgctcttggtgtctttccagaggctttctcttctcatatttatctgtgaacctctcccttctttgtgacgcctccccaaatcttttatgcagaatgagtaattgatcatttcttgtatagttatgcgctttagaatcgattgctactatcaactaaacatgttctaggcacttcacatgtatgacacatttaatctctacaggaatggattgaaaatggagactttcttcagctgatggaccatggagtctattgatggaaggaaggcatttaaaaagataagtcaaataaaaaatctttgaagcagaagaaatatagcatagtgatccctgattaacctccctcagatctttccatgcccttcttcaggagtcatgtggccagagaaacacaagctcagagggaccttaaaattcgggagggtgttgtctattccccatagtcctttactaaacctgcagggaatttcatcaactatgtatttattatttcagcaaatatctgtaagtttctctgatgtgctaatacttaccaaggtatggattcaacaaggaagagttaaatggcgtttgcctttaaatatttcacagactgctattcaggcaactaaataattattctttaaattccataccacagggatgttcaggaggataggagataaaacattttagaaggaaacctaactcattctgaaagacaattgaagactatttcctagaggatctgacaagatctgaatattgaaacatagatggtatctacaaagaactagcgaaggaagtcactaaacaaacaaacacaaaaacagaatttgcagtcacagatggatatgaggtggctgaatactcagtctcagagtaatgtctctggattaacacaattcacctcaaatcaaatcatgactgaatgtagacaataaaatatgactgatggtacatgtgaaatgcaaatggcagagttgtaagaacaggaaggatgcagatattggagactaggcagagactgaagttgtcacttctaccatcattggtggattttttgcttttttaaatatttttacataattttaatactccagagcagattttcaaaatggtagggattagtgaaagaagggtgatctacatgctttatataaaactgctaaaaatttccataatgcaaaataattgaacataatgaaggaatttactcccccataaaagagcagtattgcacttaaccaatttcccatttttcaactaccagggttgtttctgccttttcccatttatttatgtaaaaagaaatgcaaagtctgcagaagaagagtaagaaaaccttgttaaactttttcaataatccctgttacaatgttcaaagcaattacttttgctgtcaacaggaataaaatgtactaccatcagagagtgcaaagagtcaaatgtattactaaaaattacaacataagctgcatgcaaataaccccactagctctaagggcttgtcatcccgtatttgtagagctgaggcttcagtcatgtgttattaaggctttttaaaaaaaaaaaattcctagacactgcccttcaatttcagtgaaagccaaaaatgtacaaatgcttgctctcttgaggagcactattattagtgtgcttttaaaaaataagtacttctttataaacaaaccatataatatgaacattatgcaatgaaaagtaatgaaagctacataaacaatattttttcagataaatatttgaactttgctcacacaggcagacttttgcataatgataattatctattgtactcgaaggacacataagcctttccgtatacattgtatacatttcacttctctatgagagtattatataatgctgaaaacataggcttgccttcctgacattaccattttctcaactgtaaccacttcatcccccaaaccccaaaatcttaccaaagtcagagctcagccagtctttaaggtcaatactggtaaaaaaaaaaaaataataacacgtgcacatagcataagaagcaaagtaattattcgatagttattaaacaaaatacagcaatcctttattttgtctttctcctcctatcagtttcatctatatttatgtttgcattttgtatttcatatatcttgcatttgtcacatgatcaggaaaacaaaatccgtctacagcccacatgttccacatgaatagattaatacagggaattagaggcttgcataatcgttagcttagggaataattcgggaagtggccccaaatatcttaccctgcaacatagaagtgagtggtttttcaagggttctccctaaagccactggaattctcaaacacctctggaaaactcccatcagacagcctcagtctacagtactaggacagaggattctctcatatttcactggaaagctagtaatcttcaattgtgtcctggtaatgaggcctggtaaggagattctagaaactataaatttagacctttctgcaaaatggatcttagaaatcatttacaggtacatataagtaaactgcttatgaatacatttttattttttataacttttttccaaagttaataagtgcttcttttttgccccagaagcttaagtttctatagtgatcacatctggagttctgaaacactttgcaatactgttttgtacatattcaattgcatcagataacatcacttccaccccttattcctggaaagatataccggcgccctctttcttcaagctggaataatggctctcccggtcactgtcaagctttcctgttctcttctcccatcctggattcctgtttccttttagggcttgacttttatctttcttctttgctctctcattttgacgaagcagattctctagtagcttcctaagcaagcgtgcaggagaggttagctttctactacttccctatctgaaaatacttttaatctccatgatctttgattaatatgtggcttcatatagacttctaggctggacataatttccctcagcattcagaacacattatttaatttcagcggtaaacattcatctttagaagtcatagaaatttttttcttgattattttgtttgatcttttagtcattattgttattgtgtttaatttttttcctctatgtaagaatttggggtttcctccctatcgctggtgttttataatttcacagaggcacacgttgttgtctgtgtatttatcaatgtttggcaaaaagtggtgatgagggtaaactgcttttcctgactacctgctcaaccattgcaatctggagaccgtgtcctttttgttcaaggcaatgttcttgctcaacttgatgattttctctacttcaggtttatttccttctggaactcgctattttctaatggtaattttgcgaattagttacattgttttagccttttcttccttttgttttctttttcttttttcttttttttttttttttgacagagtctccctctgtcgcctaggctggtgtgtgcagtggcgcgatctcgactcactgcaaactccgcctcccgagttcaagttattctcctgcctcggcctcccgagtagctgagattttaggcacacaccaccacgttcgactaatttttgtatttttagtagagatagggttttgccatgttgtccaggctggtctcaaactcctgacttcaagtaatcctcccgccttggcttcccaaagtgctgaaattacaggcgtgagctagcgctcctggccagccttttcttttttaaacctgccttttcacattttataaatatattttacaaatattttaatttaatttaatttaatttaatttatttattttttgagacggagtcttgctctgttgcccaggctggagcgcagtggtgcgatctcggctcactgcaagctccgcctcccgggttcacgccattctcctgcctcagcctcccgagtagctgggactacaggcgcctgccaccacgcctggctaattttttgtatttttagtagagacagggttttaccgtgttagccaggaagttctcgatctcctgacctcgtgatccgcctgcctcggcctcccaaagtgctgggattacaaatattttattgttaactaaaataaaattattaactattatgatacgggtatatattatatttatacatattttatatattatgttaaatataaatatttacatattataatatttatatgtgtatgttatagtatatttgttcttatttctggtagatttttatagtgacaggagacagatgaattcctagcagacagggacaggtcctggtgaaacttaaccttcaggccaaggagagtctgaagcctgaaaaccgagctgccagttccagatagagtccaggaccagagtgagaacttccattgccatcctaccctctctctgacaactggttccttctgaatgatgccatttaaccaatcgaatggtgcctttcccaagcccacccatggaccgatttgcatgtattccgttattctaagcccttaaaaatcctggacttagcctcgcagacggcaacctgctttcaggacctctcttgctgctgagacctttctgccactcaatacaattctactctgtcttactcactctcctgtgtacacgtaccttattcctcttggttgcagaacaagaacctggaacgtgctgaattgaggaagcaaaagaactgtaatgctcctgctcgccaagctgcaggcggctggagtaaaagagctgtaataacactccttcctgcttgccagtctaaaggagtgaaaaggccgctgggtgctactccctcctgctcgccaaactactggactaaaaaaagctacaacaatttcagcaataatatcaattaatttattatattttagtgttaaaagtattatattctattatatattttttagattatgctgttttgtttttcatgtgtgcaatagcaatctgcttttagtggagaatattaatttcttttattgatttgaatctttttctgttccctgcattatctctactgtctccagttttgtcactgtatttgtgtgctgtttgtgtttctattttatgtgttaattggttatttcatatctggagaacccaggctgtatattcatggagaatgaactgattggaaactttctggacattgatagaaaatgtcagtagtgtatttagatgaatgggaatcagaatcaaatgtgtttcactcatgaactcccaaatgctggtatcgtgtatatattgttactaagaccagtttttgtactaaaaaatcctctaatttccttctagaagtgatgtaagtggggccgggaacggtggcgtatgcctgtaatcccagcactttggtcggccaaggtgggcggatcacgaggtgaagagatcgaggccatcttggccaacatggtgaaaccccatctctactaaaaatacagaaaattagccgggcatggtggtgggtgcctgtagtcccagctactcaggatgctgaggcaggagaattgcttgaacctgggaggcggaggtggcagtgagccgagatcatgccactgcactccagcctggtgacagagcaagactccgccaaaaaaaaaaaaaaaaaaaaagtgatgtaagtgggtataggagacacatgccctggtgagatgacctataggagcaagtggaggtaggctaggaggctaagggctttctctccagtggaaaggcttttagttgaatgttttagtttttcagttctcagtcacatcttctgtttttatggtatctgagctcaccactggaatcactgcttcagtttccgctgaacagtggcctttggtctgaaggtagaggaaagcatacaagaaggaacagtggttttgctgcatgggatggaggaggtctaactgctttgaatagacttttactatctttctcctttaagctccacaattcagtgctctcatatccaacttctgtgtattgtattatcccagtcttgagcctgtgcattctcttgcagcaaattaaattgttcctcctgtttcccttggagccccaccttttctgccagtctgtgtgttgcataatccctcctgtgctggttactagttacataactcatgtgactcaactcgcagccaattagcataaacctaggtcttatgttcaaattgatagtcaaattcaagggacacataagctttatttggtatgacatttgttcagctttaaggaaaatataatagaagcgatagaacataatggagacttcatgacacctaggtggaactgctaatttccaaaattactctgaactttgatgtacagtcagccctctataccatgggttccacattcgtggattcaactaactgaagatcaaagtatttggaaaaaaaacaaaaagcagactgggtggggtggctcacgcctgtaattccaggctttgggaggccgaggcgggtggattacgagatcaagagatcaaaacaatcctggccaacatggtgaaatcctgtctctactaaaaatacaaaaattaactgggcatggtggtgacgtggtttgtagtcccaactactcgggaggctgaagcaggagaatcgtttgaacctggaaggaggaggttgcagtgagccgagatcgtgccactgcactatagcctggtgacagagcgagactctgtctcaaaaatataaataaaaaataaaattaaattaaaaaaattatggttgtgtccaatcccccatggatactgacagaagattttgtgtggttacaagagttgagcgtgcttggaatagactaactcaatttaggaaaactataaattctcgggtctcttcagcttgtattccatattttcatggtgtatccatgtatccccttcaggcttgtgtgaattgttatgattttctggtgcaactacactcataagttattcatcaattacaggttactcagttaaaaaagtcagccaaatacagatgctttgtttcaaacataacaactgcagcagaactctcatttattttggtttgctacccctaaaattccttaaattagagtttcttttgtttgttagagatggagtcttgctttgtcgcccaggctggagttctatggggtgatcttggctcactgcaacctccgcctactgggttctagcaattctcctgcctcagcctcccgaatagctgggactacaggtgcacactgccatgccaggctaatttcttgtattttagtagagacggggtttcaccatgttgcccaggctggtctcgaactcctgagctcaggcaatccacctgcctcggcctcccaaagtgctaggattacaggcataagccacagcacccagccaaattagagtttctaacttaggcaaccaatcctcctcagccctctttaaggtaagaaaaataatatggagtggctaaaatgcttttattgacatccatccattttcttatcacaacaaagtttttgacatatttgcctccttttctctcttgtcctagtgtatcagtctgttctcaagctgctaagagatacctgagaccaagtaatttataaaggaaagaggtttaattgatacacagttccacatggctggggagacctcacaatcatgactgaaggcaaatgaggagcaaagtcatgtcttacatggtggcagacaagacaatctgtgcaggagaactcccatttacaaaaccatcagatctcatgagacttattcattaccatgagagcagtatgggagaagccacccccatgattcaattatttccacctgtccctgccattgacacatggtgattattacaattcaaggtgagatttgagtaggaacacagtcaaaccattttattctgcccctggcccctcccaaatctcatgtcatcacctgtcaaaactaatcatgccttcccaacagttctccaacgtcttaactcatttcatcattaactcaaaagtccacagtccaaagtcttatctgagacaagccaagtcctttccacctatgaacctgtaaaataaaagacaagttagttacttcctggatacaatggtgatataggcattttacgtccattccaaatggaagacatttgccaaaatgtgggggctacaggccccatacaagtctgaaatccagtggggcagttaaatcttaaagctccaaaatgatatcctttgactccatgtctcacatccaagtcacactgttgcaagtggtgtgtttctacatccttgagtagctccatcactgtggcctttcagggtacagcccccactcctggatgctttcatttcatggcgttgagtgtctgcagctttttcaggcacatggtgcaagctgtcagtggacctaacattctgcattttgaaggactgtgactctcttctcatagctccactaggcagtgtctctgtggggactatgtgtgggcactctcactccacatctctgttccacattgccctagcaggggttccccatgaaggatctgcccctgcagcacacctctgcctggacatccaagcagttgcatacaacctatgaaatctatacagaggttcccaaatctcaattcttgacttctgtgcacctgtagggtcaacacaatgtggatgccaccaaggcttagggcttgcagccaccaaagacatggcctgagctgtaccttggtccctttaagccatggctggaccaagtccctaggctgcacacagcaccagggccctgggcccagcatagaaaagcattttttcctcctaggcctctgggcctgtgaagggaggggttgctgaaaaagtttctgacatgccctggagacattttcctcattgccttggtggttaacattctgctccttgttacttaggcaaatttctgcagccagcttgaatttctccccagaaaaatgggttttcattttctattgcattgtcaggatgcaaattttccaaaggttgatgctctgctacctcttgaacactttgccacttagcgatttcttttgacacatgccctatatcatctctctcaagttcaaggttccacaaatctcaagggcaggggcaatatgccaccagtatctttgctaaaacatagtaagagtaatgtttgctttggttcccaacaagttcctcatcttcatctgacaccacctcagcctgaatttattatccaaatcactatcagcattttggtcaaaggcattcaacaagtctctaaaaagttctaaacttcccacatcatcttgttttcttctgagtcctccaaactgttccaacctctgcctgttactcagttccaaagttgcttccacatttttgggtatctttacagcagcacctcactctgccagtaccaatttactgtatgagtctgttttcatgctggtaagaaagagatacccaagactgggtaattcataaagaaaagagatttaatggactcacagctccacatggcaggggaggcctcacaatcatggctgaaggtgaatgaagaacaaagtcatgtcttacatggcagcacgtaggagagcttgtgcagggacctctcaactataaaaccatcatatttcatgagacttcttcactaccacaagaaccatatgggggaaatttcaccatgattcaattatctccacctggccccacccttgacatgtgggaattattacaattcaaggtgagatgtgggtgggaatacagccaaaccttatcacctagactgtttgatctaaatttatagctttatttttttccctttcttattatttgaacatatttattgaacttgtacatgtgtttaatttactcagaaattcctaagattcaacaacctttgattaatttcataggcagaaaaataacattaaagaaaggaaggctgttctccctgtaatcccagcactttgggaggccaaggtgggaggattacgtggtcaggagatcgagaccatcctggctaacacagtgaaacgctgtctctactaaaaatacaaaatattagctgggcatggtggcatatgcctgtagtccctgctacttgggaggctgaggcaggagaatcacttgaacccaggaggtggagattgcagtgagctgagatcgcgctattgcactctagtctggacaacagagtgagactccatctcaaaaaaaaaaaaaaaaggaagactattctgatataacctctcaagtttagaggaaaaataaggaatccagggatatttatgatttaacacctgctcaactctactaaacaaatcataagtggaaagccaacaatccaataagaattgtgtgtaaatccatccaatatctctgtgccaacactcacaatgaagtgaatcaaatggaccacagaatttctggtacttaatgttatttttcttttacagacatcttaaaaagatataggacaatggcaagttttctgttcacaaataaatgaaaaataatacccataataattaagacttaattaaggacattgccacaaattaagtattatccttgattatttttctaaaatatccagttgcgtgttacagttttaagaaaattctaaagtttccatttgctaaaaatcatatttcaaggaacagtggttttggaaaaagatcactaaagcagaatgaacaaaattgcttttctctttcattttggatgctgggcagaagacatacaaaagcctttgatagccaaaacacattacttaacaattaacattatgtttttaaaacttgtaatataaatgtagaaaataaatatttctaatgttacaactggatcatagcaaatgaaactaatcggttgaagtaattgatcaaaattttctgtttaagaaaaagtaaaattcttgcccaagtatcaaaactggcaagttaatgagtatgacataaatgaccaatactcagtctccaaatgcgatttgaacagtcgaactctgtagtcaaactttaccttgaagcaaaacacattctcacaaaaagtcacatttggagagtctgtatttaacaagaacattaaaatttaaatatccctgatgatgattcaaatcattaagttttagaaaactccaagccccgtgattgcaaatttctcaaggcaatttagcaaaacacaccagaaacctgttaaatagattattttattgtgccaatgttttattagcttaacagatctatttatttaagaggaccctgcagccttataaaatacattttatttggtatgcatgacgcagctatttaagagaatttgcatactggcgtcaacttccaccaggcaccttaggaattagtattttccttcatatacaacttctgtgaattatttagtatagtactaggtaggcaggtaaaattgaatttgtggaccattaaatggaattagccaaactataaggctaagggaatagtcttccaggctgccaagtgtgtcaggaatgcttagattttaaaattttactaaatacagaatctttaaatgtgaattattgacagaatggtttatgctttaaggtaaaattagttttttaatccacatgctatttttccaaattccattagttagaattctccctactaatttgtatcaaagcttttggcacttcttatcagagtatatatatatacttgatcatatatatatatgatctttattgtctatacatctagagcttatattttttatttttattttttatcttattttctttcatatggagtctcactctgtcacccaggctggagtgcagaagtacaatcataactcaaggcagccttaaactcctggactcaggagatcttctcacctaagcctccaaagtagctgagactacagttgtatgccaccatgatgattacttgaggaagagaatgaaattgtgggcgttggtcaaagaagaatttaccttaatttttaatgttttaatatgtaaaaggcactatgttattctattaaccttaagtgttgaattgtagaagttagaacaaaatctgaatttgagtggggccctaaacagaattaagattgatagatgtgtaggtcagccctgggacatcacgactcagctgatcagatgataatagaaatatctacaaaagagataggaacctgattttttggcagaaagcaaatttcatgactcaggagggcctcttgggttttgaacctaaaaactcttgaggcagctgtccattaaaacctatttgaaagacaacttgctctggctaacacagtgaaatcccatctctactaaaaaaatgcaaaaattaaccaggtgtggtggcacacacctgtagtcccagctacttgggagactgaggcaggagaattgcttgaacccaggaggcagaggttgcagtgggccgagatctcgccattgcactccagcctgggtgacagagcaagactccacctcaaaaaaaaaaaaaaaaaaaaaaaaggcaacttgctaccttgttactggcagttcttttttcaaaattgtcccaactcccaactaccataagataacagaagattctgaagccactaatattaatcacatcttctgtgtatgcccaaaaaaagacattcaaaagaaggggatggccagacgcagtggctcacacctgtaatcccatcactttgggaggctgaggcgggtggatcacgaggtcaggagttcaagaccagtctggccaagatggtgaaacctcgtctccactaaaaatacaaaaattagctgggcgtggtggaaggtgcctgtaatcccagctactcaggaggctgagacagagaattgcttgaacctggggggcagaggttgcagtgagccgagatcgtgccactgcactccagcctgggtgacaagaacgagactccatctcaaaaaaaaaaaaaaaaaaagaaggggacaacagaaacacggtagattactcataaatttggaaaggttatcccatgagataacaacatggcttccattggtgttatgtaagcactagaattccctctcaggaaaggttaagcaggttgactggattactgataggaatgtaggccatgttgctatttggaaatcaactgcaattcaccttgcagacagtaaaaccttaaaggaagaaggtaaggacaaatttacctataggcagttaaaaactataaactgggcagaagaagacatgagttccagacttcatgaggtgacatttggaaatttacagattttggggctatcgccagggtctttgctctatggtcaagaaaataaaccttccaggcacggttgctcatgtccgttatcccacctctttgggaggccaaagtgggatgatttcttgagcctaggagttcaaggacagcctggccaacatagcaagaccctgtctctataaaataataataataaattagccaagtatggtggcatacaactgtagtctcagctactttggaggcttaggtgagaagatctcttgagtccaggagtttaagtctgccttgagttatgaatgtacttctgcactccagcctgggtgacagagtgagactccatctgaaagaaaataagataaaaaataaaaagaaaaaattaagctctagatgtatagacaataaagatcatccctgtataaagtaatcagttatgaaaatctctgtgggaattaaaggaagaattaaagtgggctatgtggatccacaccaaaaaaaataaaacacagttccctgcttagtgggtatagcaggttggagtctctgtgagtcagatcctgagatacaattggatgttcaaaaggtttattggggaataatatcaaataatgaaagtagaagaggaggaaagcaggactggctggggaaccatcagatcacagtggagatctgacaatgttcctgccattccaatggttctctgaagtgacacaccttgtcatagtcccatgttgagtggcaatggtcatgctctgtcagtgtgtgacaggaattgccttgagaaaaacacgaccttggctcaaaatctgacaggggtgatgaaggaacaaaagcaggagactgtcagagagaaagtaaatagttacttaaaggaagatctcagtgacctattgtcatatctaccacaatttactccttttactgaatgtagccacttttccttacacatgtgggagcaactttgccagggttctagagagcttctcttcctgcgaaggaacattgaagagaaagatgagatgaaatatagcccaccttactgcggttagtctcgaggctgcagtgggattcatcttcttccttatgcactattcaatacaaacccacttctcctcagctacaacctccattgctctgggtggcttactccatggtgagtgggggaatgagtgacttaaaatctcactcctgagctgacaggtcatccaataactaagatcttttcaggctagttttgttgaacttatacttcacagtcaccaagagacactcaagaagatcaccttacttccatatgtagtcctactgcccccattatataatagcagccctagtttcttcccccaatcagggtcagttgcccatgagaagattgaacagtattttttttgcttactgattcctagaaaaaggagcccaaagtgtcaggcagtaacttgtagttcaatcacaatttcctgttttcatggatgagaatacacccctttgagtactaggaagtctcatcctgaagaatacattagtgagaaacagtaagagaaatactccagtgggcctctaggaatgatggtgcaaggggcaactcctgtttcttctctttgttcttggacccacgcattcttccacttggagcaccatgttgtgttaaggtctttgaattaacgcttacactatagcctagagtttggtgcgttttgatgacagagtgttgcagaaggagcgctgatgttttcccatcagttttctcaggttcaggaaaaaaatagacaaggggaaagatggggctacacagctgtcaaacatcaaaaacagggtcaaattctttattacattcacaaagcagatggaacccggtttactggacagcagcctataattaccatcctaatcatcgagttctatgtagaacatgaggaaatgtaattcctttcaggattttagtgtaatttaaattgatgtatgttatacacacattattttaatatttttaaaagagctctatgtacaacaaagcatatgtcagctcctttactgtaagcaataattttccagtatgagaacaatttggagatactgagttgaagtctccaaaactaattggccagggaaaaaattgaatttagccttagaaaaaaattatgtatctaatgaaatgtctttatcaagactaataaaatagttcaaataattgtggatggtaaagaaaaaggagcaattgagccagcaaaaatatatatatgtgtataattttttttgagacagagtctcactctgtggcccaggctgaagtacagtggcacaatcccagctcactgcaacctctgtctcccagcttcaagtgattctcatgtctcagctacctcagtagctgggattacaggtgtgtgccaccacacccagataatttttgtatatttagtagagttgcggtttcgccctgttggccaggcttgtcttgaactcctggcctcaagctaaccaccagcctcagccgcccaaagtgctgggattacaggcatgagccaacacacccggctgagccactaaaagaatttagataagggaaaagatacagtcatggccaaatgctttgtagagggaatatctcttcctccaatggatgtttcgaagacggtggttgttggggtattcggtggctaattcttcagtgtgaattattgcagaaaatgacctaagtcaaatgttgaaagaaaatatgggcaacaagttactgacaaatctgagagagtgaactgaaaaggaaggaattaaaacaactgggctataattcatttctcccccagttactatggattggatgctctgggcaaagaaggcaagttctagtcttctagtcttgcaaaaatgatagctgaacctctagacaagcagtctaacaaagttggttaggagaaaattcctcatctgttgaatgctttgagcactgattttcctattttagaattgtctgcgataaacaaacttatactatgtgaatttatgggacatggttccttaaggaatgttacataagtaaacaactatctggggaaaaaaaaaaaggaaaatatgaaataacttaagaagcctgtcctgttgggtgacctataatcctcatttaaagatctcttttatttgagtctgatagcatgtgttccaatgggaacacagcatgtgtccaatgtgagaaggaacagcttgtggagtcaggaggatgtgcaaagcctctctctgaattttgtttgtttgcatccgtgtaattgtcagtaaagctcactactgtgaaagtctctgatttgtgtgtttcctattagacaatcagatctctgtgttagattagttttctgtttttttatgcacttaactacaaatgatttttgtaatctttgaatgaaaactttttcatctcaattcattgttaaattggtttatagttttaacttctacaccagcttttaaaatttggcaatgaatttgcatcatactcataaaaggaattgagaaacactttctatttttctttaggtttaagtatgtttaaaataacataagttagataagaactttagcatatatccattatgttttcttatcactcacttagtatgtaaaataatacaaataatttgcaattttggaacatcaataactataggtgccccagggatattgatctagatttcaggtatactcacccctgggtatactcaggggattatttcccacagtatctccttaggataccaaaatccactgatatttagttcttgctgtaaaatggtgtagcatttgcatataacctatgcgcatcctctttatattttaaatcatctatagattacttataataccttgtataatgtaagtgttatgtaaatggttgttatattgcattgtttagggaataacgacaagaacaaaggtctgtacatgttcagtacagatgcaatcattcattatttttctaaatattttcaatctgcagttggttgaatccacagatgtggaaaccacagatgcagagggctgcctctataacagtgtttttttttttttttttttttttggtagcacgtcaagcctacatgacagtgtagatttgcttccatttaagtcctggagcaaagcctaacattttactatttttcaggaattcagcagacagaggcctgagagtttgcttaatgaggagctgtaacacctgagatctatgactgctgaattccgttcaccgtagtgaacataaaatcaaactggacttgaaggataatgtgcttccacggctgtgcgactgagtgagaactgaacccttgggtagtcgaggataggagcatgagcaggtaactgagaacgaggggaggagaggctagagcatggaatttcggtgttttgggttaacatttcaacacagaaatcaaggttttgcttccttttactcaagtagaccccactagctgaaactagtattttgtcacctttactagattttccattctttggcagtcccacattacttgaaaaccactgggatgtacaattatgagccgaaaaagaaatttaccactcatttgaggagactcagaaaactgaaagaagaagattaagctaaatgcttggaacaggtcacttccatcattagaagaaacgacaaatgaaacagactttaaataatgccagtcttggttagattgcttatagagttaagattggggtatgaaaaagactttctcacatttttaaacaatgattttaaaatttaaaactacagtagactaattgaaaacaggatacttacttttgtgaaatttgaatcatatgattagattagtggccttaagtatttttttttttttttttttttttttttttttttttttttttggacgcagtttcactcttcttgcccagtatggaatgcaatgcgcagtctcggctcactgcaacctccacctcccgggtccaagtgattctcttgcctcagcctcctgagtagctgggattacaggcgcctgacacaatgcctggctatttttttttttttaatttttagtagagacaggattttaccatattggccaggctggtcttgaactcctgagctcaagtgatctgtctgcctcagcctcccaaagtgctgggattacaggcatgagccaccgtacccggccaagatttcataatcacatatccacataaaatattttaaagctgtgtgccttccttcacatttttatggtttctctctaaaatgaactgttctaagcttaagaaattaaatattgtacaattttcacataattgtaaatattataaaataatatattcatgtaatcattaatattaaaaatttgctattgtatatcaaaacaccacaaaaattaattttaatttaaaaagtatttttcttttttttagttggaaattttattttattttattattttgttttattattattatactttaagttttagggtacatgtgcacaatgtgcaggttagttacatatgtatacatgtgccatgctggtgtgctgcacccattaactcgtcatttagcattaggtatatctcctaatgctatccctccccctccccccaccccacaacagtccccagagtgtgatgttccccttcctgtgtccatgtgttctcattgttcaattcccacctatgagtgagaacatgcggttctttaacagttagaaattttataatgaccctttttcttcttgagctcacaatttcattctacttctttcagagaattctataccacagtaaaatattagataattgtaattattttcgatgacaattttaaatattttttgctaccagatacgtaaaatatgaatgtgaagtgaaaaaaattttttttaaattcttgccccataagacatttagtattatgaaaccaaacattattttggtttgaggtgtcattttagttattaatgtagactgctgatcataacataaatatattacgtaactttatatatgattatagattatcaatgcctaaacattttagaactgcacaccacttacaaaggtaaatgagcctggcgtggtggttcacgcctgtaatcccagcactttgggaggccgaggcgggcggattacctgaggttgggagttcgagaccaggctgaccaacatggagaaaccccgtctctaataaaaatacaaaattagctagcatgatggcacatgcctttaatcccagctactcaggaggctgaggaacgggaattgcttgaacccgggaggcagaggttgcagtgagctgcgattgcactactgcactccagcctggacaacaagagtgaaactaaaaaacaaacaacaacaaaaaaaaggtaaatgaatcctaattgtcaatagttcatttggtcctatatggctatcaattcctgttagcgtgacacaggcttcagaactaagtatctccataatttcagtttttactaatgtaacattgagaaattttgtttcatatacctaagcgcatatgaatgggaggtacctcactgtacaatgtcactcaacaaaatgtcaaagagaatacagtgctctattatacgatttgtccaaaatgattattcaactgacaaatcaattcactcttcctcctattatgttgaaaacgacatactggaaatatatgataaacaaaacaatttatttctcagtcactagatgtaaccattggacaacatcgtttaggaataaacaatgatattgaaaataaaaacaagaggccgggcgcggtggctcatgcctgcaatcccagcactttgggaggccgaggcgggcggatcacgaggtcaggagatcaagaccatcctggctaacatggtgaaaccccgtctctactaaaaatacaaaaaaaaaaaaaaaaaaaattaactgggcatggtggtgggcgcctgtagtcccagctacttgggaggctgaggcaggagaattgcttgaagctgggaggcggaggttgcagcgagccgagatcacgccactgcactccagcctgagcaacagagcgagactctgtctcaaaaaaaaaaaaaaaagaaaagaaaagaaaagaaaaacaagagaatgattagcactaaaaccacaatgatgggttccccgaggagaatgacgattattatctttggagtggggcacaccagggaatcccagagagaaaggagctataactgaatagcagatatttactcaagttatatttatcctttaagattttgtataaggcatgtatctatgtctatgcatgtatgtgtctatgcatacatatataatatacagtattttatgtatatgattgtgtgtgtatatatataatattaaaacaaaataaaagccaatacattttaaaaaaacataattatacagtctaacattagtactaagaagacttagataaagcaattaatctaaaatatacaagggggcaagtcagaaggcacacatatttggtcttcaaagattataaaattttgcagacttttccatattgaatatttaaaaaatcaaataatattagagctaaacacaatgcattccagttactgccaaaatagagcaaaatttctactgaagaaacctgtttgtatttgtgcaaattgagggcatgacatcagacaaattagatatggtaagttctaaaggacactgttacaaaactatactttatgcaaatgtgcttgcataaaaacaatttcctgcacccatcaactcgtcatttaacattacgtatatctcctaatgctatccctcccccctccccccaccccacaacaggccccggtgtgtgatgttccccttcctgtgtccatgtgttctcattgttcaattcccacctatgagtgagagcatgcggtgtttggttttttgtccttgagatagtttgctgagaatgatggtttccagcttcatccatgtccctacaaaggacatgaactcatcattttttatggctgcatagtattccatggtgtatatatgccacattttcttaatccagtctatcattgttggacatttggcttggttccaagtctttgctattgtgaatagtgctgcaataaacatacatgtgcatgtgtgtttatagcagcatgatttataatcctttgggtatatacccagtgatgggatggctgggtcaaatggtatttctagttcaagatccctgaggaattgccacactgacttccacgatggttgaactagtttacagtcccaccaacagtgtaaaagtgttcctattgcacaccaacatggcacatgtatacatatgtaactaacctgcacattgttcacatgtacccgaaaatttaaaatataataaaaaaaattccttataaaatgtaaaattatctttttgtcagcagaaccatcagtttttttgttttgcttttatgcctcctatattaagaagatcatctcacatagcaaagctatctgctaaaaagctttctctttcaccgaccccatgtgaaacattgtacacctttttctgggccaaagtacttaatgtgaatgttatacaggaaagtgtaaaataatacaccattaattttacactacattttgatatcagagctaccctggctcccagagaatgaacaactgtcaggaaagtttctttcaggaggaagggcagagaaagatcataagccagggagacagaggaagctagatccttatccaggagctaactccaacacaaaccagttctgacaccctgagacacccgtaaccttcctaagtctcagtctctttatctacaaagtgtgttttgttagctttaaaagattcaatacaggcaaagtgtcacaagtaaatgtaagttataaactttatttcagagacctggaaggcataccaaggcaaacagaagagctgcagcaaatgaagacagtgtggtattggcaaaataagaggcaaacagatcaaatattcagtagtcacatgtggctagtggctactgtattggacagtacagctgtttagtatttatttattcattctactgttattatgtgagttctttctactttggagatattactattaatgttcctaggaacattctaatacttgtttttagtgtttatttgtatgtgtctctgttgcatatgtatgcagaagtggaattgctggcttatagattatcatatgttcaacttcataagttacaggcaaacaatattccaaagtggttgtatcaatttccctcctaccagcagtgtgcaaattaatttaaaaattatgtctacacaaaaacctgcacacagatatttataaatgccttatcataactgctaaaacttggaagcaaccagcatgcccttcaataggtgaatggatacataactcatggtatagccaaaaatgaaggatttagttatgtattcaagattcataataaatgagctgtcaagccatgaacagacatggaggaaacttaaatgcatattactaagtgatagaagccaatctgaacagtctatctcctgtatacttttaactatttgacattctggaaaaggcaagactaaggagatattcaaaagatcacagtttccagagggaaaccatggggaaggcaggggatgaatagctggagcacagaagattattaggacagtgaaattattctgtatgatactactatggtggacacatacagagtacaatggtctagactcatacatggtacaataccaagagtaaaccctaacatcagttatgaactctggggataatgaagtgtcaggttgggttcattgattgtaacaaatgtcccactcgggtgctgtgggatgttgataatggaagaggctgcatatttgtggggacacagtaaatgagaatctctgcatttttgctcaattgctgtgacgctaaagcttctcaaaaataagctattaaaaaactaaataaatcctttaaatggtaatatagtggaataatgacattttataggcaaaatgacataaagaaaatattgatatatctgatatcaacatttccattttcacagatttacttatatatgggattatggttaattgatggtaaaatgttatttgcaaattataagaattttttaacctattgttaataggtaataaggcctgatgctacaacaggcaaaagatttaaaagagtataaagtgaaaagcttgatgataactgtggctcgctttatcatcaaacttttgttacctcatcaacgattcagtgaacatatgctatttgctagcattgtcaaagtacatgaagaaaatgaatctcctagtatatcaaaacattacagcgaatgttatagacaaaattggagacttacgctacatgattgtacttgcttcagaagagaatatgaataaatgaaaagaaaatttgttagttttttttttcaagagattctccagagaggaagaaaaaacagtttgcaccataaaaaataagcaagaataattttagctgaagactagaacaggataactagatgagctaacccaaaagaggggctactcaaaatttagttagttgtgaatttcatccaaacatttatttgtcaactatgatttactagttgttgtattagacattgaagatacaaaagtcagtaattacagaggagcctactgcatagtgagatagtaacacaaacacatgattgtaatacaattgtaatattatttaagcataaagcccagtgcatcctgataacttttagtagttgctgttaaatactaaatgccagacatattaagtatttacttttaagatctcctgtgtctgtggcctcctattcttattactcctctggtggtagttttattactagctcaggggcctagctgatccatatagcagtgcatgaatttctgtaaagctatttgtataaagaatctcaaagcccatcatctgggtttagggaattgagccattacaagattgcaagatcacctagttttgttcccccggatatttctttaataactctttactatgctcactttaggagtagagacgccaaagttgcaactgaatctgtcatgctctgctttactttgaggtagagaaaaggtctattgactcttaataggtgcaaaaattctgtatatatgttggagaattttgagcagacatctcacatctaagtgaaagagttgaaactgaagtaacaggagaattttgcaaaaacacttaattcatctgcataagtcactctgctagaatataaaagggacacctgtacacataggacacatgagacctgataagaagacaaaaatctgtgactttcagttatgtaattcagggtaacgatatgaagcttgtttaataaaatgatctggagactagaatgaaatgcaactgagataaagatcccaacttaacttttaaaacttacactctttttgtttgtttgtttgtttgtttttattatactttaagttttagggtacatgtgcacaacatgcaggttagttacatgtgtatacatgtgccatgctggtgtgctgcacccattaactcgtcatttaacattaggtactaaaggtcattatttttgagtctgtctttatctctaagcgctgactattcacagatatttaaagttctgaaagcctttttccctctttctctctctctctcactcttgaatgtgtccttttgagctttgactataaatgtaaaaagaaagaatagcagcttttatgtatttaaatacagtccaaggtagtcagtcatctcctggttctaatttcatacgatgatctgagcttagatcactcttcaatctttagataagtttttaaaaacagaggcaaaattaacacattttagataaacctatgtacagttttaatttttgagaagaggagggaaaggaacttaactacttagtgcatctgtggtaagacaagttgtcatccttgttggtatccattacaaaaaagtcaattgcaaatggttttgtatttcttagttgtacaaaaatctgggtctgtgtttctacatgtttttcaactaataaaaagcttgtaaaactaaaaaaataaaaataaaaataaaacttacactctttgaaggaaagttttccctcctataaaaagagcttatgaggtaaatttagaggactttaggaataaatactataacatctgttgtttaatatatatgacagtatttgtttaatatatatcacaggtttacttcgaatgcttctggataaattaggaaaaaaaaatggctatgatggacagtggaaggtttgaatttagttacatttcagtgatggaattatcaatccaaaagacatgtaaaatcatgtaacgtacaaattaagtaaactgggtgggggagaaagcaaaaaatgaaaaactatagcaaaaaatggaagagtaaaatattttcagaaaacacatactagataaaaagaagacaatggagagagaacctatacaatggaggtgcgacataattaatatcctggacagaaggaaacggctgtgtcagggtcacctgcatactgggacaggcagagtgaagaaaacagtggaagctttttcttctttcatttgttaaagttagctgtttagctttataaagatatccctaggaatatgacattgtaacttttctctggctttgtgctttcttagatactaaattctgccttgtggtgacgaaaattaatggcataaatgcattcataaaggaagttattaaagagttatgtgactgaattacaagtaaggattattatacttgcaagttcataatgtaaatttttaaaaaaaaaacataatacagaaagggcgtgacttctaaaaacacagtcccgagaagagttgtacaattcataaggatatctaagctgtgtataagtagtttgtgtaagtgcttgactttccataattttgatcctgtagtaatttttttaaaaaattaaaggccgtagggacatggatgaagctggaaacccatcattttgagcaaactatcgcaaggacagaaaaccaaacaccgcatgttctcactcataggtgggaattgaacaatgaggacacttggacacatggtgaggactatcacacactggggcctgtcgtggggtggggggaatggggagggatagcattaggagatatacctaatgtaaatggtgagttaatgggtgcagcacaccaacatggcacatgtatacatatgtaacaaacctgcacgttgtgcacatgtaccctagaacttagagtataataaaaaaaattaaaggccatatatttactttagaatgtaatgaattcttgaaaacagaaagactaagagttgatcaatctggtgaaggcatcatcctttattgtgtataaagtttgtttaggggaagcactgttccttgaggagctgatagagtcaatgtttaacagtagggattctatccccatgttttcttatcttggagattgagggggtgaaagtgtcactgtgtctgctggagagctcagatttaaattaaatattagaccacaataattttatgatcataggtttctaggtgtttggtatttttattactctatttctacagggtttgtttgttttgatagttgtcattttaattgtttggctttatcatacattatctccactcccctttagaattgtgccagactagaggaaatgaggataaatctggaagagagagaagaagagagaggtagaggaaataaaattattgactttggatcatttttgatacaaatagtaacagaaagatatttttattaaacattcctggtacacgtgaacttaaaatgtggcatatatatatgctgacatcctattaggtatttttcatatcattcatgtgctagatgaaatagaatgagaattagaatgaagcaaaacataccagattatgtaaataacagtgagaaagattgtggagtgagtgagttaataaaaaatccctgagcaccaaatctgcttctgagccttaggttaagcattggaatgatttcatccagagttaaaaatttatctttgaattaaatatctaaagggatacctcagaagactaaaattagaaccctagtttccttccaagggaaaagatcaaatacatgtacaaacttacatgtccttgtaattgagtaaccttcagtttgattgagaatttaacactgtaaataaaaggtaagttttaatttaccagctccgtatgggttgttggagaattaaatcattttggggagcccatatttgcataacacaatttattatttgtaattaactaacctttacaaagttccatttttaatttcctcctgtcaagatatctggaaaatgcaaagttaataagcattgcatataagggactgcgttattgtagaagctttggtaagcattggatggatgaaacaggcaaatcccaagttaattaaagagttgtcaacccatcacattgttcacttgaaaacatgtggagaaatattttatattatttctaagtaacaacatacataagttatcatttcgtagagtaataagctaaagtaacattgaccagcactgtttgatcagcattgttttcttctagtccttcctattttgtgagcaccaaacattcatagccgagcaaaacctaaattaaaatcagattattagatatagtatatatataatgataaaatccaattaggatattatattctatcattggtatatatacatatatatttttggacaatattttcaataggatgggaaacagttaatctctacagcacaaaaattgattacagtgttttgacaatgatggtttccatcacaataggattattatactttgtgttttgagcagagagaattataaattattataagtgattaaaaaccagtcaaagtcgtgcaatgctatggaatccatcaaactagagggtcctttacaccatgccagcactccaccaaaaggatacctagaaatttattttgcctacttccaagtctaataaaaataattaaaattgacattctcacatttgtttttttcctccttttaatattctcggctaataagaaatattgatgcttcttgggatttaatgggtttatttttaataagaaaaaaaaaaaaaagcaattacaaagaaaacatccatcccctacccccgacctcagagtgttatcaagctctgcttgatgctttatctaaccattatagtacatagaaacaaaaacagtagtagtagttggccatatgaatctaaattagatccaatgctttgtgggactgtaggaggtcttctatgtcagtttcttgaatgtacatatgagacacccacaagatcaagtgtgcaagctagtgtagccattcatgtctttctattttactaggttactaacttttctcaatattttagtctttttactcgctgatttggtctagttctgtgtccccacccaaatctcatgtggaattgtcattctcaattttggagatggggcctggtgggaagtgattggatcatgggggtggttactaaaggtttggcatcattcccttagtgctgtctcatgatagagttctcaggagatctggtcgcttgaaagtgtgtagcactcctgtctctctctctctcctgatggccatgtgaagacagtgaagacatgcttgcttccccttcaccttccaccatgattgcaagtttcctgaggcctcctcagccatgcttcctgtagggtctgtggaactgtgagtcatttaagcctcttttctttagaaattacccagtttcaggtacgtctttatagcaatctgagaacagactaatacacttatcaaaatgtcttatgataggactgactaagtaaatttagaatagttgttcaggaagatgataagtacaaaacaaaacagcttgattctcaagccatttctataatcacatgcatttttgcatttacacacacacacacacacacacacacacacaccactcatacaaatgtaatctgacttcgtagtgaccattgtaattttcttacacaatttccttaaaattaaaatttcttacacaattttcttaaaatggtgtcaactagaaacatgaattatttgccaggttcttaaaatttgaaatttgctttggaatatttaaaagggcaaagctcactaatttttttcacagcctggctcttcaataatttcctattacatgattgtcaccaccatccatcatgttatttcaaaaagaaatttgggaattcttttctaaccatagtaaatcatcagacattaagaaaaaaatgcaccctgctggagtggctcacgcctataatctcaatactttgggaggctgaagtgggaggatctcttgaggccaggaattcaagacaaaccttggcaacatagcaaaaccatctctctacaaaaatattttaagaaataattagcccggcttggtggtgtgcacctgtggtcctagctacttaagaggctgaggtgggaggaccactttagcccaagagtttgaagctgcagtgagttatgatcatgtcactgcattccagtctgggtgacaaagtgatgccctgtctaaaaaaaaaaaaaaaaaaaaggaaaaggaaagaagaaaggaaaagaaaaatgcaggcctggcatggtgactcacacctgtaatcccagaatgttgggaggctgaggtggatggatcatctgtggtcaggagttcaagatcagcctgaccaacatggtgaaaccctgtctctactaaaaatacaaaaattagccgggcgtgctggcgcaggtcagtattcccagctattcgggaggctgaagcaggagaattgcttgaacccaggaggcgaaggttgcagtgagctgagatcgcaccactgcactccagcctaggcaacagagtgagactctgtctcaaaaaaaaaaaaaaaaaaaagaaaagaaaagaaaagaaaatgcagagaaaaattgttttctgcaatttaaaaaaaatttaaagtttttaaaaagtatttttaaagttctttttaaaatttttttccttctaatcttttacagaaccactaaattgactgtggaaaatgggcaagtacaaaaaagttcacacataaacgaataataattgttttaattgtataaaccagaagtttttctaataataattaatgaaaggtaaattatatatagcagattatagtaacaatgttatataatttttatccacccaattgtaagggttaatcaaaaataaaactaagctgttataagcagagaataggaatgatattctccattagagaaaatattggctgaatctttaaaaaaaaacagatactctagtaaaatctaccaagaaacttaaaaatctcacttgattatttattcagtttttttctattctgaagaaagaacagtattctagaaaaaaaatcaatctataaaagtagtaataattatttggccaaaattatagaaatatttttctatgcataaatatatatatatataatttatacatttttctatgtataaatatgtataaaatttataaatgtattttaatattaagctcaaaaatggaaacctgtgttattgctcctaatcatgattccccttttccagtagaaggttttatatttatcattgtcctttgtcatgtgacttgcactaccgtaatatagggaggatgttattctccacctccttgtcaggttgatcatgtgatttgctttgtcaacagaatgtgtgtgaaagtgatgtacacgaggctgggcgcagtggttcacgcctgtaatcccagtactttgggaggccgaggcgggtggatcacgaggtcaggagatcgagaccatcctggctaacacggtgaaaccccgtctctactaaaaatacaaaaaaatagccaggcatggtggcgggcgcctgtagtgccaaatactctggaggctgaggcaggagaatggcgtgaacccgggaggcggaggttgcagtgagccgagagatcgcgccactgcactccagcctgggcaacacagtgagactctgcctcaaaaaaaaaaaaaaaagtggtaagaaagtgatgtacacgagttgtcactggaggtttaagagccattccatgtttccaatgctctcctatttctcttctgtcaagagaagcacattgcctgaataggggtctgctccttgggattggagctcagcatagagaatagagcttgattaggtgtaaagtttcataaaggattttgaaaatttttgaaactgcacaatttgtacagtttttcaacctcatatactatatatggatacaccacacacgtatgcaaatatatgtaaattaatatattaaattaaattatataatagtaaattgttaaattaataatataatttaatagcttttcctttgaaggcatatatgagagattatttataaaatattttaaatagataatacaaaaatttaaaaaatatataatgttatataaaaatattatatatataatgttatataaaaatattattttacataattacatattatttatgtatatagtttatataatttaaataatatattatataaaatcatatttactaattgtttattagtatagatgagtatacttttttattgttgtattcatgaaaagtagcttgataggcatttacattgttactggatcttttcataatctcaaatatgacttgaacattttaacatctagattcgtgttctgtatcttaaaacgtttaatgtttgattaaactaatttgttaaactcataagaaaggagtgaatttccatttcagatttatgtcatttgcagtgtgtacctacgtaatgtcatgataggcattttacatttttaactatatatttttgaggaatcctaaaggtgcagtggatggtgtctgcagtatgcaagcctggtggctgtgggaccagctaaagtctgtattccaaattttatggagaagatcaggagaattatatgctatgatatatttaaaaatgtacaaatatgcttcaaaagattaaaagtagtttgtaacctatgcaatatttgaagagtagctagcgtattgatatctacttcctgcattgtagctttatgtatctggtgatgaaacacctttacatgcatcctgttcagaaacctggagccaagtaacacttcataaaagtgctgaaatggctaccattcaacaatatttcatcatatagtctgttttctattcatttcacatttattctctcatctttcatctatggacttcttttctatattttcactagataaatttttattatagagagacaactttagaaggggaactctgccagagactcggtgatttattaacaatacagagtctgattcttattaagtacagaggtataattttcatctcctctccatcctttcccattttcaatttctgcttctaatttatgcccccaattcaccttctggtttatgcccccaattcaccttctggtctccacacaatgaccttcttcagccctcactatcataatatagaatccccagcatgaacaggcagactcgcccttctgcaaatagtgactcaaggtcacctgtctctttccattggggaatccagcatctttcatccatagcttccaagcatgagacaatgagatgatggagcataaaaagtgatgttttaagggaaaggcaaagatactctacagatcacttttgttatcattcttataaattctgcttcacatagccccaacctaatggggagaaacttagagtggcattcccttttgtgcataggaagtataaacagagctgatgatcacataactaatttcttccatatgatcttctacctaaaatacatgaatatattcaaaggtaaatttaaatattaagctacatttattaattccacaaatatatcatatgtgcactgtatgacaagcactatgggatgcactatatatataagtgttataagtgctaacaaaatccagaccctacttttgagtaatacaaataatgacgcgatattgttgtatttctttttgtcttcttcttttttttttttctttttgagatggagtctcactttgtcgcccaggctgggatgcaatggcgatcttggctcactgcaacctccacctgccaagttcaagtgattctcctgcctcagcctccctagtatttggaactacaggcatgtgccactatcccctgctaattttttgtatttttagtagagaaggggtttcactgtgttagcaaggatggtctcgatctcctgacctcttgacctacccgcctcggcctcccaaaatgctgggattacaggtgtgagccatggcacctggcctctttttgtcttcttaatactattttatctaatggcttttgtcagccatggtggtcagtgaaaaaatatatgataaaacttactgaactgaatacagctactaaatcatattttttcacttcagcataattgtttgtgtttgaaacaccataactgcaaaacatgaaggatataaaagatgggcaaaacacagcaaataaaaggaaagcataatagtgacatgactttgatgaaattaatttcttatttaaaatatttttatacccctaacaaataaaagatcttaagatatcgtacctaacatctttactgactttttaatgagaaatgtagttttacagtgatttagtaattttttgcataaagtttactgaaaataaaagaatatttctaatgtatgtggggtttttttagcaccttctgaacagccaggcacagtggctcacacctgtaatcccagcactttgggaggccgaggcaggtggatcacgaggtcaagagatggacaccctcctggccaacccggtgaaaccccatctctactaaaaatacaaaaattagctgggtgtggtggcacacccctgaagtcccagctactcgggaggctgaggaaggagaactgcttgaaccaaggaggtggaggttgcattgagccgagattgtgccactgcactccagcctggtgacagagcaagactccatctcaaaaaaaaaaaagacctactatgtactgggcccacctctacgctttggggaaaaaaaaattagatagagctcagatgtttagagcttgcagtctgggtcaatggttagacatctaaacagatatgatatcataatgaggtaagtacaaagagagttagacactaagttacttccctatgtcagtgactcaaattgctttgagtacacagatccttcccagcagctaattatggtacaatttgatgaaatgtgtgtagagtgtcaccagtacacaaatcatggtttgttccaaattactgctgaatacctccttttaggtgtccactcttcaatcccatcaaattctctatttatataactcatttacacaccagaactagatcaagccgtagtgtgcagcactttcccctttactacagtgcagaagagtgcagtgttcatgaactcaggcttaaagtaggggctcaaaaccatgactttgctacctaccaggctggaaaggatatttcacttatcatgcttaaaagtgttttttttttcccttcctgagaaaagttggaaaaagaatactacttatcttagcaagtgttacaatgtaagcagaggcttagcatagaattaaatgtatggtgctcattaaatgacaatatataaactgtagtagttgctgtcaacattgatattatcattattacatcattttgtgtgaatctgtataataacttttgtaattttgtaattaataaagggatggaaattgcaaaaagagaaatgattgctttgttaattgattaatatgtggcattatacgcacagtgtttaaaagcatggcctttgaacgaaaattgccttggtttaaatctcacagttaccttctaacttatggtctaaacttggtaaaaatacgtattctttcctacttcagtttccccagcaaataaattgagaaaataatagttcctttatatttgtcagggttttccagagaaacaggaccaataaaatgcatatatatacatgtatgtgtgtgtatttattattaaatatgaggaattgactcacataattatggaggctgcgaagcctcataatctcctttctcccagctgtagacccaggaaagctggtggtgcaattcagtctaagtgtgaaggcctgagaaccagaggaaccaatgatgtaaatgccagttccagaatgagagaagatgagatgtccagtcaagcagtggggcagaaaagaaaatgagagatgaggggcagattactctttcctctaccttttgttctattgagggccttaagagattggacaatgatacccaccacactgagaaggcaatctactgtactgaattatccaattccaatgctaatcccttccacaaacaccctctcagaaacagccgaaataatgattggtctgggcacaccaaggcccagtcaagttgacacatgagattaactatcataccctctgtcctgaatttaccatgaaattgtatgaagtgaaatatgtaaagtgcttagcatgataccttgcacataataagtactatgtaagtgaatgctttgtcactaatactactgttttaattatttatagtattcatgatactattaatatcctcttggaaagcatatgaagtatatgggattcctctgatctcttatattcccaatattgagatcacttattccctgcctctttgtaaggtctccttctttttttggctgttaccacattaagggtaaaatgttgtatcagggtttcaaaattctttttctgaaacctggcaaattgtctccctaaccacttcttcatgacatagatcatgcctaatgcattgaagacatacagcattcttattccttcaacaaaattgtggtggagcacctgccaggtgttgctatcacagcagctatgcattttcctcacactcatctggggcttttccatcacgtgctcggcccttcatctcatcacttgtagacataaaactgttcctagtgttctctccttgaaacttttccttcccttatctgtattttttccctaaaagagttccttcaaatctacaattttaaacgccaactatctcactatgcttagtctttctcctaaactagctcaaaactctggttatcaaaggcatgataacatctctcccccaccaccactggtagcccattggcattgaagattcacctcgtacaaaactgaacacctctcttcatccaccttacttcctaaaaagggtatcttttgtcattggtgtcaccatttattcaactttccgtcatgacttataaagatatcatggattcctccctatctgttactccccatgaccccagtcaattatcaaatcttgctaatccaaaggtgacatgtctccccaccgctactgctgtctcagtctaaacttcatcatttcttaagttaattactgaaatagccccttgactatcctgtaatatttcatcacttatagatcagaatatcattatgtcattttcctatttaagagcattaagtaatttgcaatgtccttgaataaagttcacagtcctgagcatgggttataaatccatgcatgatatgatccttgtatatcttctaacctcatccatcttatttgctttggttcccaattcagatctacttaagaaggcatttatttcttctcctatgatagcccctctgtttaaaatttcctttcctccttcatttcaaaatgaaaagaaatcattttctcttattaaagctgcttttaatcacttctgtataaatgtaggagtctatcaatatgacattcttattatccctcaacattcttacatgctttttttcaaactgtctcaaaatcatttacatttttgcctaatttccctgctggtctgtgaatcccttgtagtctgattctgagacacagtcttagttctaatataagcaggcacagcaggtcttgacatattgtagattctcagatttttttttttgaaatgatgaacaatggaataaataaatcaatgaagcatgttgattgggagaatttttttagaagatggttgatgtgattatactcagatatgttgcattgggtaagacttttaggaaactggtaaattcatagtttaatatttataaaatcaacaatcaaaaacaaaattttgagacagtgtgttctcacatattagaaaccatttacttataaaaaaatgacttcatctgggcgcagtggctcaagcctgtaatcccagcactttgggaggccaaggcgggtggatcacaaggtcaggagtttaagaccagcctggccagtatggtgaaactccatctctactaaaaatacaaaaattagctgggtgtggtggtgcatgcctgtagtcccagctactcaggtggctgaggcagaagaattgcttgaacccaggaggtggaggttgcagtgagccgagatcgtgccactgcactccagcctggccacagagcaaatctctgtctcaaaaaaaataaaaaataacttatatgatacaaaggcataacagagatcctgttttatttaatggttcattcaatttttgattaacttaggcagactttcctaataggctaatttgcatccactcaaaattcatagtttcaagctctaatgcccaaggtgatcgtatttgaggaaaagccttttgggaggtaattggggtggggctctcgtaatagaattagtctccttataacaagaggccagagaaatttctcactttctctctttcttttgtgtacatgctaaacacagaaagatggcatgtgagcgcacagagagatgctgactgcctacaagccaggaaacatgtcctgagaataacacctgccttgctgggactccccagcctccagaactgtgagaaataaatttctgttgtttaagccactaaatctggtgggttttttttgtttgctttttttttttttttttttttttttttttttgagacggaatcttgctgtgttgcccaggctggagtgcagtggcgcaatctccgctcactgcaagctccacctcccgagttcacgccattctcctgcctcagcctcctaaatctggtgttttgttatggcagcacaagaagactaacacaactttattatgacaccagtggaattcttagtacatgggatctcagcagttaaaacggctgaagagattaccgtggccgatcttctatgagtgcaagaaccacctttctaacaattctgaagtgttattatttaaatgtcagtggaaaaatgtactgtgaaatggaatcaatttggtattgccagttattaattctattgctaattaatattaatattttcctccagaaaaaaaatatatctatttctgtacttagaagaagattaagaaatgtaaaagtatgtactattattatctatgggtgttgagattacaagagtttcttaattttttctgtatattttaaatatttttcaaattttctaaaatgtttttctaaaaattaactgaggaaaaaataaaattagacaaagagaaaaagaatgaaagaaatatagagagaggctatttctgtgctgaagtaaaagatccctcctgtttactactcttaaacaaaaaaaaattgtctttaatgaatatgatgcttctacaaatatctagctatgatagtcattatcactccctttagatttctctttttaaagttaataataatcttatttcttctgcatgtatccctgcatttatttcagaaaagctccctgaggtgatggcaaaatgtttgggattattaattgaattatttttctgctgtgttatttttcaaaaaaaaaaaactcaagtgtatttttaaaaaatatatgggttacagtacatgaacccaaattttgactatatttcttaaaatatatattattctatcttaacgacatggttttacctatgacatttaatcccgtatttaattgttctcatctcaatattttatattggaggtgatagagataattatttctgtacaaataatgcttatatattatacatgaaagaaaaatacatgtaaaagaataattagcaaaataatctaaaaattttctgttttgttgacttcagtgaagagaaaatacattaggtcaactaaagatttatgcatttattttaagttatgtgaaaatattgagttcatctgagttttaactataagagataatgacacacgtcacatattcatgtgacactcaatcataattttattaggaaaggaaccaaagcagttataaactaagaagactttggttcaattaaaaatattaatactattgaaaacatacaagaaataatgatggtatttaattaatgcattagtaaccctttatagattatgacatatcactggttgattttgccaccatgctgggtattaatgacattacttatcaatctataaatctaactaatgtagcgtatatatgaatggcaactaaattttagatattatatttcatttgtgtggcccattttataaatgtatacttttttgtacttatttatctatttacttatctcatatgacagagttgatttacagtatttttcttgtcattaaattaaatctccccatctgagacagaatcattaagagcagccacacctaaagaatagctactgctatttaacatacagttaccttgcctagaataacaggaattagatacaggcatttataggatagtttattgaatattatcacccccttttaagagtgttaccttaaatcatataaaatacattttgacagaaatttggtatctatttatcctacaaaaaacttcttttaaaaatttatgttctttaaacttttctacattttttcccatttgctgctcttcatatttttattctatctggaaaaatcatagagcatcatgaaatttaattttgggaaaattactggcttaaggagaatatggtcactgatatggtttggctgtatcctcacccaaatctcatcttgaattcctacgtgttatgggagtaacctggtgggaggtaattgaatcatggggacaggtctttcctgtactgttctgtcactgatatgctttggctgtgtctctacccaaatctcatcttaaattcccatttgttgtgggaggaatctggtgggaggtaactgaaatcttggaggcaggtctttcctgtactgttctggtggtagtgatggttttgaaactgggagtttccctacacaagttctctttgcttactgccattcatgtaagacgtgacttgctcttccttgccttccaccatgattgtgaggcttccccagccacgtggaactgtaagtccaattagacctctttccttcgtaaattgcccagtcttgggtgtgtctttatcagcagtatgaaaacagactgttacagtcacctataaatgaactatgtcaaaacaaacattccatggattattaaatccattgatattaatgatttatttacatacataaacaaaacaaaaagtcacttaacaatggcaataataataatgtttgtttgcatttattaagctcttaatatgtaggaggcactgttctaagccctttacatgtatgaatttattaaaacaaattatctggcaattaattgaatttgagaaagtttgagccaagttgatccatctccgttctattatttaaggccaataggtcaaacagataaaattactcacctggcattaatgtttatattggaacaaagatatcagcttaaagaatgtctgcatctgggctgggtgcggtggctcacgcctgtaatcccagcactttgggaggctgaggtgggtggatcacaaggtcaggagatcggaaccatcctactaacacggtgaaaccccgtctctactaaaaatgcaaagaattagacaggcgtggtggcacatgcctgtagtcccagctactcgggaggctgaggcaggagaattgcttgaagccgggaggcggaggttacagtgagctgagatggtgccactgcactccagcctggatgacagagcgagactccgtctcaaaaaaaaaaaaagaatttctgcatcagttatatgatataattcaaaggcccgtttaaagttaaagagcccacagattgttccttctagttccaagatttagttgtctattaattcacttcagtgttagttatgagttgatcctaaaaatagaaatattgcattcaccaattatattaggtgaagagttgaaaaagttacctattttttttcttctgtctgtggattttattcactccctatgcgtaccaaagaacacacaatcaacacaagcttccagatgcagagatttgttctgaactctgtggagcaggtttgcttaacagcaagcattctctcatcaattttaccttcagcatttgagatttcgttaactccttaagctaattcaaatattgacatttttcagcactgttcattttgtaatcagggagcaacagaaaaaaaagatgagaaagcacatcacaaaatcacataaattcaaaagacatatttgtatctcacacaaatagtacctctgagctccaacaagagtaattcagtggcaagcctgaaagtattgatttgttcaaacccccccaagggccatgccctttctctatttagtgagaaaaaaatacaaaaatgtgtcatttataacaaagattttaatatcaagctgatcaaaagctatgttataatggcccacgtactcattaaattttaaatttatttttagtattttttcattacttagatttatttatttctatacattttagtatcataacatcctccccctttcaacgaatctgagagtacaattttccttcacagtcgacagtcattcttctcaagaagagaaataattttggaaatgatgaagaatgagattgccttgctgattttaatccaaaagatgctttgaggtgaaatctgacagagggtccctgcggatattttatactgtatcagcattgccgttgtctttcctaatcagcagttttatctattctccatggtagggcatagatattttttttatgcttgagatttcacagaatgggaagtctgaagccctgaagatttctgatcacatttttcaaaagcatcataacttattcattcatcacttgtggttccacacatacatgcaattaccatatgtatctctctctgctaaggcctatgttaccatggagacaatggacttctttgatatttgaggacactggtcacttttactactcgctgaaatgtggttttagctaatatcattaggttaagttattcaaacaacccagttaaatttatcatattaaacactaccaattatattttcaacttacaatttatgcataacacaaaactacctttagaacatgcctgagtctgttgcttaacagtacatgttcacaaaattaaacacaagtacaaaaattattcatatctaatatattttcaatggcactggacatatttgctctttatttatttatatatttatttatttatttgacacagggtctcactctgtcacccaggctatagtgcagtggcatgatctgggttcagtgaaacctcttcctcccgggctcaagcaatcctcccacctcaacctccagaatttctgggactacaggcatgcaccaccaagcctggctaattttttgtattttttgtagagatggggtctttccatgttactcaggctggtctcgaactcctggactcaagcgatccgcctgccttggccttccaaagtgttgggattgcgggtgtgagccactgcaccaggcttcctcttaattttaaatgcacgcttcagatgtgtaggaaaggtaaatttttttctctattttctcttgccttaagattctctgccttagatttttatatcaaagtatgcagtgtcatttgtatagtaatatctacttccatgacagagaaacaaatctagtaaactaactcaaactaacacattaataacaatgaatttgacatacaaaagtatttgtattttatcaaaagatttcttatagaatgtattcatcctagggaggttccataatggaagtatgagatcctggggcatcttttccttggagaattttagacgatatctgaccttcaatatgtgataagaaactgccctgtcatcaaagtcaatgttatcactgttaagtgaggatttgtttgtgttaaattaaatgattaatggatgtgggaaattatgtcttaataagaaaatagaattagcctgggcaacatggcaaaaccccgtttctacaaaaaatgcaaaaattagccaggcctggtggcttgtgcttgtagtctcagctactagggaggctgaggtaggaggatcgcttgaacctgggaagcggaaggctgcagtaagccaagatcatgtcactgcactccaacctgagtgacagagtgagaccctgtctcaaaataaataaatagataaataaataaaaaacaaatgaaagaacgaatgaaaatagaattcacttaagcatatatccacccaactaaatctggcccaactgatttttctggttttattcccttagaggcaacgtggactaaggaaaagagaatgatcctgaaaggttaaatagaattatggctttgacaactaatgctgcctaacactggacaactcaggtaagatcattctctcttacaaagtcgcctttccacaatttgccttgttgatcagttcctttctatttttatctggtttgttgtctctcttctgtcatttctgctctacctctaagatgattttttgttcttgttttcttgtctcctccatacatttttgtgcttatgaaaatttcttacttgttttcttctcttcaccaactaaaatctacctttagactagaaatgtgtgaccatttcttacgttgtgtgactatttagcagtctggcatagcctgtaagcctttttctgagaacgatgttttcaatgcgtgaaagcaaatacaaagaatgataaaggaaatcgctgaaatacaggtgtgaaactagggtagtcccctcttatctgcaaaggatacaatccaagaccccagtgtatgcctgtaatttggatagtattgaacccagctgccatcaatcagagcacagttctgttcatgtcttccacccacatatttattgcctcttctatctcctaactaagcacttattatgcactgggacaataatttttgcagtttgaggtgcaacagacaaactggcacaaaactcttttctcttcgccagattaaggatggaagatttgatcttaccatatgttatagtaacttcagcatacaattttttcctttcttctttgctttgacaatattcactttttcgttttaaagaaagtactttaagacgtctttttggcatatgcgagttgccagcatcgctactcttgttctttggggccatgatgaagtaaaagaagggttatttgaacacaaacactggacgaaggaatgattcacaatgcccagggcagtagggagtggaacagagtgaaatttcatcatgttactcagaatggtgtgccatgaaaacattaattgttctgattttttttttttttttttgagatggagtctcgctctgttgcccaggctggagtgcagtggcgcaatctcagctcactgcaagctccgcctcctgggttcacgtcattctcctgcctcagcctcccgagtaggtgggactacaggcgcccgccaccaggctggctaattttttgtatttttagtagagacgaggtttcaccatgttagccaggatggtcttgatctcctgaccgcgtgatccgcctgtctcggcctcccaaagtgctgggattacaggcgtgagccaccgcgcccggcctctgaaatttttgttttgttttgaggcagactctcgctctgttgcccaggctggagtgcagtggtgtgatctcggctcactgcaacctccaccttctgggttcaagcaattctcctgcctcagcctcccaagtagctcggacaacaggtgcacaccactgcgcccagctaatttttctatttttaatacagatggggtttcttcattttggctaggtgggtctcgaactcttgacctcaggtgatccacccacttcagcctcccaaagcgctgggattacaggtctgtgagccactgtgactggccagttggacaatattgatagataattaaaacgtggcattttgccaaggtaagttaactaaattatctgagctatgtttgtgaataaatgaatgataaatatatatatatatatacacacatgtaaatatgtgtaattatatatgtatattcatatttatacataactcctatggcaaaatggtttttccactcaccctcgcccccttaaattctgacgccctcggcctcccaaagagctggggttacaggtgtgaaccaccgcacctggcctgaaatatttttcatttgatatttttagaccaaggttggctgcagttaatggaaaccataggcagtgaaatgtgaataatgcgagaggactactggatagttgaccctcgagcaacatgggtttgggctgcatagatccccttctacacagattttttttctccatctgccatccctgagatctcaagaccaactcttcctccttatcatcctcttcatcctactcaatgtgaagatgaagtgaatgaagatctttatgataatctactttcacttaatgaatagtaaatatattttctcttccttttgatttttaatcacattttattttctctaactttattgtaacaataccttatataaaacatttaatatacaaaatatgtgttaatcaactatttatattattggtaaggcatccagtcaactataggctgttggtagttaagtgttggggaagtcaaaatttatccagagattttctactttgagggaagccagcgtcccccacccccatattgttcaagggtcaactgtaatttaaaatactttattaacataagtcaaaagatctaaagacacgtttcataggtatcataatttcaaaataaggataagcaccaataatctttcaaaatgtctgcagcaactataatgttacatgagagtatgtgaagtttatgttggtgatactgtgctctgttctctaggacatgatggctcatacctgtaatcccagcactttgggaggctgaggcgggttaatcacctgatgtcaggagtttgagaccagcctggccaacagggtaaaaccctgtctctactgaaaatacgaaaattagccaggcatggttgtgggcgcctgtaatgccacctagtcgggaggctgaggcagaagaatcacttgaactcaggaggtggaagttgcagtgagctaagattgttacattgcactctagcctggatgacaagagtgaaactctgtcaaaaaaggaaaggaggggaagggaagggaagaagagagagagagagagaaggaaagaaagaaagaaagaaagaaagaaagaaagaaagaaagaaagaaagaaagaaagaaagaaagagaaaggaagaaagaaagaaagggagagaaggagggagggaggaaggaaggaaggaaggaaagaaagaaagaaagaaagaaagaaagaaagaaagaaagaaagaaagaaagaaagaaaaggaaaggaaaggaagggaaggagggagggagggagggaaaggaaggaaggaaagaaagaaaaagggaagaaaggaaagaaaggaaagaaagaaaaaagaaagaaagagagagaaggagagagggagggagggagggaggaaggaaggaaaaaagaaaggaaaggaaaggaaggagggagggagggagggaaaggaaggaaggaaagaaagaaaaagggaagaaaggaaagaaaaaaagaaggaaagagaaggaaaggaatgaagggagggagggagggaggaaggaaggaaggaagaaaggaaggaaggaaggaaggaaatggtattttaagaggttagtcaaaataatgacgtattattttctctcaagatcacagactccttacttctctccatggattccttaggtgaagaccactttctgtagatcaacccctcctcatcccctatttaataacagttcatatcataatgcttcttaataaataattttatttcccttttcactgatatgattggaaactttttgaggtcatcaacctttgtatgtttgatgacattgccagtgactaatcaataaatattttggaacaagtagaagagatcttgctgttcactcccggtgtctctcaaagaaatccagccctgtgtaggtgattgctaataagacttatctattcctaatatgagtgtgagatgaggtgcttcatgagaactatgacaaattcccaaagaatttagtcctcccaatacgttggaactaaggctaaagtttaggctgtctcctatgtcctccctcaataaataaataaacctatttatgtatctaataaattacattaggataaaatgtaaatgttcttagtcaaggagagggagataagaagggagaaactgtctcacctggccctatttgctacccagaaaacataggaaaataaagatataagaatgggaatttatggaatataaatggagaagagacactagccaagagaaattcaaccccaggtcccttggagttaagaaagaaaaacattaaataggcccagttctaataattctaataggcatgcctcttaacaaaaacaaatcatcaaatgcttaggaatgagacacctcaattttcaagtcttttttgtcatgtagagaaggcccctcctctgaaaaagtctctcaggacatacgtcagtcatgttatcttgttatagtcaaagcagttaccacctggaaacccttcgagatcaatgaccaaatgcttaaagtaccactcagtgattgtgaaaggattaaacatcaataaatggctaatattgcacctggtagtgagtatggttgagtttctctccaaattttctttctgaaaatttacagagccttgattataagcaatgtgcttgattcagaaacatcagccaacttggaattacaacttgcactgctgggtttgtttgcaaataaaataaaagcaagaagaaaaacacagagacaagattataaaagacactagaatttggaaaagagattaaatattattaaaatatcattcctaggaattagaaacagttctgtaagcaataacctaatagtagactgcacaaaacgccataacagaaattaaattttcatttgtgaacaggaataatgaggtaatataaaagagatggacttggatttttttgccactaaagattaataattgtctaaggtctgtattcagaattaagatgcacatttggttgtagagaaagatcatttattaggtgtgctcatcctttaaccttggtccacagtcatggcatgaaatagatgcaatttccatttcaccagcactggtgtcaggctatttcaatatatatactagataaaatatatatactagatacaatatatatttcaatatgtatactagataaaagtaagtatgtcctttctagagaaaaatgcaatataaaaagggaatataatggccgggcatggtggctcgcacctgtaatccgagctctttgggaggccgaggcgggtgtatcgcctgaggttgggagttcgagaccagcttggccaacatggagaaaacccatctctactaaaaatacaaacaaaattagccgggcgtggtggcgcatgcctgtaatcccagctactcaggaggctgaggcaggagaattgcttgaacccgggaggaggaggttgcaacgagctgaagatcgtgccattgcactccagcctgggcaacgaaagcgaaactctgtctcaaaagaaaacaaaagaaaacaaaacaaacaaagcaaaacaaaaaaatgggcatattaataaaaagtagtccttttcaatgtgaatgttggacacgatattgtcaagttagttgttgggaaagattgacatctaaaaggtgctctaaccattttggaaataatttatagttatgaaattattaccttaaaaccatattgtattggcataatgctttacttttatttctttaaggctttaaaatcattttatcatgtttagattctgtatgaagtagtatattaaataatacgatacttatttccacgcaaaaatgtagagtttatatttttaattgtggtgtgtcaaggtttatttgaaaactaaatatataaactataatattaaaaatatataaattgtaataagtagtcagtttgtctcaaattttaattgtaaattatcagtatcctttgcctggatgtccgtatagactggactgtctgtttcagttggataactcagcaggttcagcggtagataggagttgatattcattagagggctaagattacaccagatagttttcatcgtgtttcccatcatatcccaaaacattgcagtaaagtagaacgttctatccatgttacagatgaagaaattatatctaatatagatgaaatagcccacaattttaggctaaatccaaatttagtccagaatccaaatccaaatctgtatagtacattttgaaataagaaagtgtgatgcctccagctttggtctttctcaagatttccttggctattctggtttttggtttttttttgactctgtatgaatttgaattttttttctatttttgtggaaaatgcacagctctaccattcatcctagtgtcttccatgatgcatttggttcctaattcgcttgagacattaaaaattcaattgcaacactatcacaatgtatcattattttctgagttaaacaattttttccagcccttagactaggatcatggtaaacttatggtaaattaggtttcttgctggtgttgttattattttggatttttcaatttttatatggcaagataatgttttcctaataaggactgtttctcattcctagattcttgatttggggtgggaggagagggttttttcccaggacatctctattcagatctaggttttagccctgtcttccaaagtatagaatatacatgtgtgagaaaaatatttcagagttgtaaaagtttcttatgtattttgaaaattaaccacttaattttgttaataaggtttggaaatgttttctcccattctgtagcttgccttttcattctgttgattgttttctttgctgtgcagaaaattttactttgatgtcgtcctatttttctatttttgctttagcagactatgcttttgatgtcatagctaagaaataattaccaaaatcaatttcaacaagtttttccctgtgtatgtgtgtttttcccccctaggagttgtacagtgtcagttcttgtgtttaaatctttatccattgttagttgatttttgtctgtaattaagataagggtaaaattttatcatatttgcatatgaatatatatagtgtttccaaaaccatttgttgaactgtactcaacaccactgtactcttctcattgtatgttattggcatccttgtcaaacctcaggtaaccataagtattaatatatgcataggtgtatttcagggctctgtatgctgccccatctgtctttatatctatctttatgtcagtaccacactgttttaattattatagctttgaattttgaattttgaaataaggaaatgtgctgcctccagctttggtctttctcaagattgcttcagctattctggtttctttttgtgaatctatatgaatttgaatgttgttttctatctttgtaaaatgtgccagtgggattttgacagagagagcattaaatctaatatggaaatagctttcggtattatagatattttcacagtattaagtattttaatccatgaacatgagatatttctttcatatattgtgtctatttgatatctttcattgtgtttgtagttttcagtgtacaattattttacttccttggttaagtctatttctatatcgtctattcttttttgatgttattataactaaaacctttaatttccattttagatgtgttttgttagtacatggaaacacaactgacttttttatgttgatattgtatcctgcaactttaccaattcctctggctaggttttccagtgctatgttgaatagaagtggtgagagtggacattcttctctttttcctgatcttacagaaaaagctttcactttttcaccatgaagtataatgctccctgtgagcctacatatatgacctttattatgttgatgtacatttaattattactcccattaattctccaaagatggaggtctggaattgaagaaatatgcaaaggcgcgtaaaatgcaatttacatacaattatatggtagtaagtaaatgctataagaataatggagaacagcaggggacaaaaaaggatagtgtagttgttgggagctcttttcttgagggtggtcagattctaattgaacagaaacatgatggcagttaggggacaggtcatgtggagagctgacagaaacctgttgccaacaagggaaacaacaagtccagaagttttgaggaagctgtgtgcatgacatgtttgatgaatagcaggaaggtcagtaaggctagaggtgaatgaggaaagataagtgaaaggagatgagatcttgcaggtgggaaagtagttcatgaggatttttaagttatggtgtgaatcgtgaactactacatgccacaaaaaacttgcccatgtgctagaggctttggccaaactttagcccagcttctacctgcactaggccttgtcctcacagtggccataagccctgagcaatgttattctgccaaaccacaaaatataattcataccaacccacattgtcaaaccatgttcagtaatgttttactcactcttcttctgtaatttttcatttcctggtagccccctttttggttcctcaggcaccctcttttccccatccctttctttttttttcacatccctgtgtccctttatgttctctctcagttcttcctttaaaaaccttagtcacctttattttagttggcattgagttcattccatattggactctgtcttcctgttgtaggctgaatgttttgtccctcaaaattcataggctaaaatcctaaccccaaaggtgatggggactttggaaggtgattaggtcatgagacttctgccctcatgaataggatcagtgcccttgtaaaagatgcccaaggaatctctctctcctgttccgccatatgagttcagtgagaaagtggtatttacaacatgggaaccagaccctagccaggcacttaatttgccaacatcttgatcttgagcttcccagcctcctggacggtgagaagtacatttatgttgcttataagctacctaggtcatggtgattttttaacagcagcctgaaatgattaagacacttttctactacaatactttaaataaaatttgtcttgttttttcactctggtaaccataaggattttgacctatatttcacacaatatggaaagtcattgaaaaggtttggacaaagaatgacatgtttggacaaagaatgacataacacaaagaatgacatgtttggacaaagaatgacataacacttgtgttttatacaaacatctctagctattacaggaaataacaggagagcttcaaaaacagagagacattttgaaagaccatgggtttgctgaattctcctgagctaagtccaaggcctccttcagacccagaagagctttcttgacattcagtactgaggctgggttgatttaaggagtaaatacagcagagatttaggagaattgaattgccaaatataactgttcagtcattcagtgtcacaaagtccagtctcttcacttaagttgataaacttgggaccaaattagcacacatatggtaagcaagatgagcctactccgaatgggattgtgtttacccattgtgatgttagggacactgtgaaggacacgttctcttaaaatctttagtcctcaattcctaaaattcctcagttaggtatctatatctttgtattcagaactgctttatctacagtctactgttctaatttaaatacacctagaagaatatcatgtaaatgtcacatctctttactgtggatacatttaggaacacataggaaaagcagatcagaataaaaaacattgatccctgaaagatgggagtaaaaatatgctgaaataagatacaagtgttaaaagctggggatgtcaatgagtcacagtcaatctttgcctgctcacaattttgccaagggctggccagagagtagaataaaatcttgaactagctgtagtcaaaaataattttttaaataaatataaacagatgcaacaaattatgagaaaattgactggaaaattactatagaaaaaatatttaacaaagagttttgaggaagaattataataatagctgaaatttattaagcagagcaattcacataagctagttactgttctaaggtatgtatacatatatttatataatgtgtacatgtatgtgtgcacacatgtgtatatatgtgcacatatatattcatttcacctttatgacaagccaatgagttagaaaatattattttaccattcaatatttgtagaaaataaaacacagaaaaattaaaggacttacccaagactatgcagctaatacctgacttggcagaatttgaacacgagtctcactccagagtctatgaaatgtaacactgcaagcatatcttaaaagagcaacataacattttgtttcctgcaaatatagaaactcttcatttcatgttaacacttccttttatgtaaatgcagtctttgagtgcaattgatagtaaaatcagacacacacacacacacacacacacacacacattccaattctacctctcaggtatcagtaaaaagaaaataaatgtaaaaatggttaagaataagataataactgcactgggggaagtgactcattgtatataaaagaactttggaaactatttgaagtctgatagacctgggtttttgttcttcctcagcaagttaataacagtgacaataagtgagttcctttacttttaacagtctcgtttttttggtctgtaaaatggtaatgataaccatctaaaaatattgtgtaaaacaaaaataatatgtatgaaacagctggcacttagtaggcaaacaatgaagaatatttgctgaataaaaagtaaccaggaaaatttggttttgttctctttttaaagtgttaataatgccacactggaaatggggattttagttccggcattagctttttgataacagaatagaatatctactgtggcctctcccacaaggaaagcctataacatacttggaaagttataggctctcttacaatgaaaaagagaacaaagagccccaactagaaaatatgccttcatgttctcaatgcattttgaattatagtagacccaaaggaaagcaacactttacaaccactctgggtaagtctctatttgtcctatatacaatgtacatataatataatactaccatttattccatatattttagcttctagaaaacaatcaggatctctggctttaagagaaatggatttattggcaataagagtctgaattatcaactcaaataaaatagcaatttccccacaaatcaatcacacaccagggagaaaaacactgttctaaattatgtaacaagtgtaaaaagtgtttctaaaggcttcattcagaatgaaagctttacaattacttatattatctatgacttgtataaacttttagaatgacaaagtattttctaagttctgttcacacccacaagttgcattacatatcctcagaaggatttgggttgggatataggagagtaatgtttaggctgcttgcatttaattattccatatttcttgtagaaaagaaagaaccatatggcccttatagcaaaatactggtccttgaagaccaccatttgcatttgtaactccttcataatttaaaataagcaaagatggtctgtttctgtggaaagtacacatgtctgcctgaattaattttcttagattctgatttgaaaaaaagtacattttcttgttttattccaatcttcaatgaagaaagataaaaaatgtagggcaagaaataaatggacaaatttctaaaggtgtgtgacatgatttggctctgtcctcacccaaatctcatcttgaattgcagcttccatgtttcccacatgttgtgagagggacctggtgggtggtaattgaatcatgggggaaggtttttccagtgctgttctcatgatagtaaataagtctcatgagatctgatggttttataaaggggagttcccctgcatacactctcttgcctgccgccatgtaagatgtgactttgcttctcctttgccttctgcaatgattgtgaggcctcctcagcaatacggaactgtgagtcaattaaaacgctttcttttataaattacccagtcttgggtatgtctttattagtatcgtgagaactgacaaatacagtacatgtgtgatttttggaaaagcatattgatttacaggatggagatatagagaaaataatcaacaagaaaaaaaaactgagagtgttggcatttaaaaatatttattgttcctcacctatttgcattgggaaaactccaaaagtttgaaaacatgcattgttggttaggctgtaggggaagtactttgtcatacattagctggtgaggatacaaaatggttcaacatctattatggaaatttgttgatatctagcaaaattgcatatgtttttctgtttgatccagcaatcttacttctaggaaactattcccaaaatacaaaagaacaaatacaatgctatgtagtcaatgaaacactgattgacatagcaaaagactggaaataactcaaatgttgataaatatgtaactggttgttaaattatggtaaatacccaaaagagagtactgcacagctaaaaaaattataaaaaactatttctatatagtatttaaggaaaacttccaggatatattgtcaagttaacaagttaacttccaggatatattgtcaagttaactttaacataaagtggagaaaaatattttttatttacaattcacaatgcttcattgtaaattatatattcattttaattttttaattttctatttttctgggtatatagtaagtttatacatatggaatatattagatattttgatacaagcatgcaatgtgaaataagcacatcatggaaaactgggtgtccatcccctcaagcatttatccatcatgttacaaacaatccaattgtattattttagttactttaaaatacgtaattaagttattatgactatagtcaccctgttgcatattcaaaacattttatattttttaatttatcttaattttttttctctttttattatactttaatttctagggtacatgtgcacaatgtacaggtttgttacaaatgtctacatgtgccatgttggtgtgctgcacccattaactggtcatttacattaggtatttctcctaatgctatccctcccccacccccaccccccaacaagccccggtgtgtgatgttccccaccctgcgtccaagtgttctcattgttattatgttttagaaagtgtttattatattgtccacgtctctattgtggggctgagcatagtgtttcataaagatctcataaagatttttccaattattttgcacaacaagaatttaaacttgaaaaataaacttatgagattcattatatatgtcttcatatcagtaccaagttggagagttgtaattttcatcttacaactttcatgttaaaactatactaaacagtatgaaatctagaatccaatgtttatgcctaagagttttttccattttatacttttcttttgctttccattattatccacttagactgtatgcattatctctatcttgtgtgatacatttctgatttctataaggaaatgccaaatatattggcaaatgtcattatttaaacagtctttatgataaattcaactcaacaacctaatttctcatttgttagtatgaccaagattacaagtaacaaccttgcagtttgtccaaccatgtgaatgctttttaaaaattattgattagatgaggcaatgttttattgttttgataaacaacatagaaaaactgtaaaccataataaaccataaatttgtttataagttcaatgaacagctaagagaatatatgtataatgtagattacatatatttttgaaaatagtataccaattataatcaatttgattttccttaataataatgtaatataatagatatactgaaataaacatgcagctgacaaacatttcaagtttaagctttgttaaaaatgtccttaatgccaatttgtttcagtgggaagagaaacatagcagtgtgtgaagagattgtaagaaattacattttctaaatgctgatctagcaatagtcactggcttccatctggagctgtctggtaactagaataatccaaaggagattgacactgaccatgtaatttgaccaaattgggcaacaaaacagtcttgatggtgtgcaaaatttttatattttgcttattgtattaattttatccaattagatgagcaatgtgtttactgcattgtcaaaatcaacaattaacaagtaattatccagaatattttttcaaatgaatgattacatcctccaggttagcaaatcactttagttaatttggttatttccactgttccactgtattttacattgcattgaccaagagtgaatgtttttatggctaggagaacatttaattacataaccatggtcacagctacaccagtgcccaaaattctatttttaaaatatggccttttctttgttcaaaaaacaaaatgtgtcctgctttatatcaacaaaccattcaaacataaagttgagctttggatgacaggcctaactagcccatagggaaaggaaatgtatattgtaatgcatgagacacaaaatattttctttctagttgagtattcgttgttgtaatcctttagggtgaacagtgcttccccttacactgacatttgaaaaaaaagtttactttttttttgctgatgcaataacacattaattctgaactaaatgccctaattagcaacacaaatgtgagaatatctggctggtttatttatttatttatttatttatttatttatttatttatttatttattttttgagacagagtctcgttctgtcacccaggctggagtgcagtggcgtgaactctgctcactgcaagctccacctccagggttcatgccattctcctgcctcagcctcccaagtagctgggactacaggagtccactaccatgcccggctagtttttttctgtattttcagtagagacagggtttcaccgtgttatccaggatggtctcgatctcctgacctcatgatccgcccatctcggcctcccaaagtgctgggattacaggcgtgagccaccgcacccagcccctatctggctgggttttaaagctaaagcttgtgtgcttggagagtactaaacccaaaatcttaccataaaaaacttttgttctcattcagtagggctatctagtaacatggcgaccagcatggtcagcctgtgaagaaatgagaaatgattccttaacacactggttcttcctggcgtatcccaccaactcaatagtattttcattcagagaaatcacttttgttggttctctttccactgcaatatggcaactgtgaaaggtattatcattagtttttttgtaactaaaacattaaattcctacccagacgtgaggagtgggtgaggaaattaattctctggagggaaagaaactgttaataaactcatagtgtgcctctttcactcccagagatcagtggggagacatgatgttctttctgaaaacttgacgagtccaagaaaaaagaaatatacattaatttcagaatttctgcaaggctttgtaaaaccaagtgtcgatatccgaaattctgagacctgctgagacattttaaaaggcctgcagaggatgagcgcagtggctcacatctgtaatcctggcactttgggaggccaaggtgggcagatcacctgaggtcaggagttggagaccagcctggccaacacggtgaaaacctgtctctactaataatacaaaaattagccaggcaggggcacgcctgtaatcccagctacttgggaggctgaggaaagaggatggcttgaacctgggaggcagaggtttcagtgagccaggattgcgtcattgcacaccagcctgggcgacaagagcaaaactttatctcaaaaataaataaataaataaataaataaataaataaataaataaataaaagatctgcatttcttttcttttttttccttttttccttttttttttttttttgagatggagtttcactctgtcaccaggctgcagtgcaatggcgcgatctcagctcactgcaacctccacctcctgggttcaaacgattctcctgcctcagcctcctgagtagctgggactactgactcacgccaccacgcccagctattttttttttttttttgtatttttagtagagacggggtttcaccatgttggcccagatggtctcgatttcctgacctcgtgatctgctctctttgacctcccaaagtgctgggattacagcctgagccactgcaccctgccgaaggtctgcatgtcttgtatctgttaagtgacttttggcattgttgagatacacaagaaaaagaagtgaaacgaatattatctctaggttcaggaaatttaggattttgatataagatttaataaaagaaaatttttccttaaaatgaaattaggcaacttctactatgctgactcatagttgtagttttttctttttgacctgtgtgcgtgcatgcacaagtacatgcattgagactgaaaattaacacaaggacacaaagaccaaacgaatttggacatccagagcccagatcatacagcctgctgaagtatgacatggtttcattgttgcctgaagtttacctctaaaatttactaatgtgaaatatttttaggtgtggatggccttggtggtaggtaggaaagaatcataaactgagaacaatttctgtggtagtgaacaaggtttcaaaagaagtttggaaatatgattagggatgattgatgaacaaaactctgaaattagggagagaagggaaaactacaaatcaagagagtgacgctagagaccctctgagtagcagtttatgatttgtgtatgtgtgttttttccttgcactactacagtttaacacaggctttcaaatcgtagctatttcaaaattccctctagttaaccctaagctttcagtatttacatttgcaagatttatgttaatagaattctgtggaattaaccaagcaggttgttaaccaacagtttgaatttcttcgcatcactcttaccctgaaactaatgcccatgggagaaacatcatgtcatgtggacttgagtcccagagtcacacaaagaggtagataaaaatgcaaagaatgtccaagcagatctgagagcaaaaggaagagggacatggcagaagcagtcacaatattgacaactctgtagtatacctgaggcaaactagcccattaggatgaaatacttgtataaggaaaatatcactttgaagacaagacagctgtttctttcttgcccactgattgtatatttggtgttgaactgtgttttatgatttcctcatgagaaattttatctcatgatttaaccacagtagatgccagctcagtagaggaataagaaacatgcctgtagaaagctataaacaatgctgattttctccacggcctttccatttctattataatgctcaccatgagccattaaccaaagattaatactttcgatagcacatagtggacagagactgatctgttttatgtgtgaaattaaatttcctcctctttttaaactcctttgcttatttttgttgctatcagataatgcgttagcaaaatgctgcaatattgaaacgtcaatattcatttataaaattcattgagatgctttaaatgaatccaagtagcacaaaataatttgtatgaaaaaagctccttgcctaatcagactcataaattcgagtgaacatttaatcatttaggtttatttgatttactagcagtttataagattctttgatgatacaaatgcagaataaataacagtacaaaaattaggaatttttcaaattaaactcactgagtgagtttgttgcacaaataatgaacatgcaattaatagcaaacaataaagtattgggccatattctatttctaaaggcaattgaaaaactaatgaatcataagttgtaaacaaaaataatagacttttttatcttaaaaatttgcattatttcatttttgcctcgtggatacatggaaaatgtcatttatattgtttcttaaatgatatactctaaatatattacattcaaatacagctttaagcatgctatgaaatattcatgtgatgatttcacctcccccatttgtatccattaaatgaaatataatacaactgatgctcaagggaaataattaaaaatcaatactctcaggatttcctctataaatgagcagcgacagacaattttatttgataggtactagcagcagggtaacaaagcaggatcattattttgtcattcaagcactgcaatactgggataaattttggaaactggctatgtagatgctgttagaaacacctactgttgttttcaaacaaagacactcaaaaagagcattttcagtgctgtatcccctcattgaactttcctcacatgtctgaaaaccagacaagatgtcatagcaggaagacgaggtgaaaataaatgggaattgtttcataatgagagggaatgtagtgtaatgaatagcggagagaatattagaccaagaaaaccagaagtctggaaattttatcccggttttcctgctgagtttctgtgaggccttagaaaaaaacagataaatcataagttgtaaacaaaaataatggactattttttctatctaaaaattttacattgtttcatttttgccattctggggctcacttttctcatctgtaaaatgaaatggtgaaattaatgattaacaaggtaccttcagcacttcccttgataactgctactataatattaaacactgcaaaaatctcatgtttataaccaatgcaattttactacagaaaattcggaaataatgaaaagaatcttggaaggtttgagatgtgaggaatgaaattaataaggaatgatgtggaagaagaactaaacttgtagggcaggggtccccaaccccccgccacagacctgtaccagtccttggcctgttagaaaccgaggcacacagcaggaggtgactagcattgcagcctgagctcctcttcctcttagatcaatggcggaactagattctcacaggagcacaaaccgtattgtgacctgtgcatatgaggaatccaagttgtgtgctccttattagaatataactaatgcctgatgatctgaggtgaaacagtttcatcctgaaaccatgccccccatttttcatggaaaaattgtcttccatgaaaccgattcctatgccaaaaaggctgaggaccgatgttgtaggaaaatataaaggattgatagaaggtattagtccattctcacgctgctatgaaaaaatatccaagactgggtaatttataaaggaaagaggtataattgattcacagttccccagggctggggaaggctcaggaaatgtatagtcgtggtggaaggtgaagtaaacacttctctcttcacacagtggcaggaaggagaagtgccgagcaaggcgggggaagtcccttataaaaccatcagatctcaggagaattcactcactatcaggagaacagcatggaggtaactgcccccatgattcaattacctttcactgggttcttgccatgactcgtggggattatggaaactacgattcaagatgatatttgggtggagtcacagccaaaccatattataaggtaataagaataccctaataatagtaataacaataatatcttcacaataatatcaatggttgacttttgaagtgaaaacaggtcaaaatattggaaaataaccacatatcagggagaggatgaccaataaaaattcaaaaataaagagttataaagttctctgttttaaaaaaagatagtatagattaactttagagtcttctaggttaagtatggatagtaaacagtggataacaactggtcatctatgtgaaaaaaatgaaaatggatccctagtttctataatatactattgtttatctatagggaaaaaataaaattagatcctcagtaagttcttacattaaaaatggaaatttaaaagcaaaaatattaatattttgttgctatataacaaattctacagtctttgttgcttaaaatcacattgatttatgatcttacagttctgtagatcagaaccccaggtgatctcagatggtttctctgcttagattctcacaaagtccagatcaaggtgctggccaggttggtctccagtctggaggctcaggagaataacctgcttccagcctcatttagtttgtcggctgaattcagttccttgtggttgtagaactaaggttcctaaatcctcacaggctgtcagtcaggcaccagtctcaacttctcaataccacctacatttctcttcatatggaccccccatggtcaagcaaccaaaatccatcacacctttctagtcctttgaaactctctggcttcttattctgctgctgctcttgctgctgccactacctggagaaaactcagcttttaaagacttgcttgattgagtaaaggccacccagcagaatttccaaatataaaggtcaattaagttgggtcttaaatgatatagtcaaaattccctcatggcaatacctagtttaaggtttgactgaaaaaaaaaagtggggaaggggcagcaatgctgggaaataagcatctttagaattatgactgccacacaaaccttttaacatttttaggaaaaaaacacaagaagatatgcatgtaacctaaaggtgataaagacttttttaaaaacaaaagcaagcaaacaaacacaactaaaaatcaacaaataaattaatagatgacattaaaatacaaagttttttaaatctaaaattttcttaacatggagaagtcattttcaatatttaaaactgacaaaggaatcatagttaaaatataggaagaagtctactaattaagtggaataagtacaataaccccacacagaaatgaccagaagagaccattagacatgttaccaaaaaagagatctgaaaagattattaacaagtcaaagtataatcaaattatttagtcaccaggaaggacacactcagttcaataacatttaatattacacctattagattgtcaaacttaaagaaaatttaacggcactcatttttggtcataatttagagaaaacctttcatgtcttaatgatggaaatctaaattaatataaccagtttgtaaagcgaattgcaattattttataaaactcagcataaacatatcctgtggccaagcaattccacacttttatgtactatagaaaaattgctgcctaagtgaaggagacatgtaaaatagcagatttggatcatagcaacttgttcataataacaaaaatgtgggtcgggcgtggtggctcacccctgtaatcccagtactttgggaggccaaggcaggtggatgacaaggtcaagagttccagaccagcctggccaacacggtaaaaccctgtctctaccgaaaatataaaaattagccgggtatggtggcaggcgcctgtaatcccagctacttgtgaggcggagacaggagaattgcttgaaaccagaaggcagaggttgcagtgagccaagatcgcgccactgcactcactccagcatgggcaaaagagcgaaactccacctcaaaaaaaaaaaagaaagaaagaaagaaaagaaatgtggaaacaccccaaattgtacctaaagcagaatgaaatataaaatgtattttatatatgtgtgtgtatatatatatatatatatatgtattttttttttttttgagatggagtctccctttgtcgcccaggctggagtgcagtggcacgatctcggctcactgccagctccgcctcctgggttcacgccattctcctgcctcagcctccagagtagctgggactacaggtgcctgccaccacgcctggctaattttttgtattttttagtagagacggggtttcaccgtgttagccaggatggtctcgatctcctgacctcctgaactacctgccttggcctcccaaagtgctgggattacaggagtgagctgccgcacccagccaacgtgtaatatatttatacaatgtgatattatacaggcacaattctaaaacttttggtttcaggacaaacttacactctaacaatgtattaaggagtccaaaattcttttgttttgtggctcacgtgcattgacatttactgtattattaaaacagtgagattattttaatacctattcattatataaaaataagaaactcatgatatgttaatatcaatagcttatgtttaaaatatattttacaaaaaattgctaagtggagttttatgtatttgcatatctcttttatgtctgttttaatagaaaatagctgctttgctttcaaactgtttttgacatattgctctggttaaagtgtgtggtgaagaaaatcttgtctcaacacaaatacgttgttaaaaatgggaagagtattttaatagattttatgtataattatttatatccttccttgatactatgtcaatgtctatgtcaaaattctactagtggtagtttcttaaaaatagttgaatggttttgtaatatcatgcattgatcattcaaaaaattattttgcagaatttttcaaatttccaaattttgacatatttcattttacaatataaaaaattcacatttgtaatatctcatcaaaaatgtatccaagtattgaggtactgttgagctcagagtagtggatacatgttgagctcagagcagtggatacatattttccaaaattatacatttattctggaaagttgcaacagtctccaatctgctttccttccactttcactctgctcttctgttatacagggaagtcagaaaaatacgattatatatattaagtcatgtcactctcctgatctaagcctactgaaggctttccatctctctcaagatgaaacataatgtcttaactggattccgtctgcaccctcatctgtaacctatcttacccttctgttcctgtcactcattctgtttaagaacaaccaagtcccacccctacctttaggcccaggcatttactgttccttctgccaagaatgttcctccaggttatctccttcccttcattcacgtctcagcttaaatgtcgtctcttcaatggagaagtcccgatgacctaatggagaataccaaggtaaactattttctgttctgtcactttgctttcagtttttatagcatgtctattttgtaaatattttggcatgattacatgtacacatgtattttatacatttaacttttcaaacaatattacatgcatatgtgtattaattttaaatttatgatctatgtccctcacttagtttattggaatcaagtttgtttctggttacttcatctcaaatacctcgaacagtgcttgctcattttaagcactcattttaagcactcaatgtatttttgtgaatgaatgtgtaaatgcaagaatgagtgaagaatttcataagtgatatgtttctttcaatcaacttctttatttttttctaatttttttactttctcactccattgctgattttgtatgtgtgtgtgtatgtgtgtgtgtgtgtgtgtgtgtgtacaaatcccctctcccattcacttctgcttcctgtgatttctactgttcacattttttattttcctgtgggtcctaatgaaagccttctctctttgtgcctttcaggttttataccactcatcagctctgtacttcttgtcttctccatttggttcaggaagctgagactaagtcataagccaggctgtgatctatgtggtaacctgaagctctgaaaacttataatgaaatcctgctcttcagctgtatttctaagagtgaaagttatggggaaaaaaagaaattcaatgaaaaataatgggacaattgctaaattatgaatcacaatgtaataaccaatcatgatgcaaaattattactcacagtctggcctttagtgctgactggcaattccactatatctcatagtccatgtcttctaggtgacaatctggtacttcttgctctacctgcaaacctctaaaatcaccctcttaatctcaattgacaccctcttctgatcaactatagctgcatagcaaaccaccagagagtatgagatggagcttaaaacaaattacactctctagtaacaaattatttacagtattcccataagaaaaaaaatggattattgtatcagatgtggtggcttatgtctataatcccagcactttgggaggaagaggcgagaggatcacttgagaccaggagtttcagaccagcctgggcagtgtaaccagatcccatctctaccataaaagaaagaaagacaaagagagaggaggaaggaaggaaggagagaaagaaagagagagagggagagagagaaagatgaaagaaagaaagaaaaaaagaaagaaagaaagaagaaagaaagaaagaaagaaagaaagaaagaaagaaagaaagaaagaaagaaaaagagagaaaggaaggaaggaaggaaggaagaaaacgaaggaaggagggagggagagagggaggaaaaaagaaaaaaggaaggaaggaaggaaaagaaagaaggaagggagggagggagggtgggtaaggaaggaagaaagaaagagaaagaaagaaagaaggaaaagaaagaaagaaagaaaaagaaaagaaagattgattcattctacctttccaaggcatgtataaagcctctgctcagtgtgcacttgcttgatgcccaggatctcattgagaggtggcagcgtgctggcagtcctcccagccctcgctcgctcttggtgcctcctctgcctgggctcccactttggcggcacttgaggaggccttcggcccaccgctgcactgtgggagcccctttctggcctggccaaggccagagccggccccctcagcttgcagggaggtgtggagggagaggcgtgagcgggaacccgggctgcgcggggcgcttgcgggccagctggagttccgggtgggcgtgggcttggcgggccccgcacgtggagcagccggccggccctgccggcccggggaatgagggacttagcacccgggccagcagctgcggagggtgtactgggtccccagcagtgccagcccaccggcgctgcgctcgatttctcaccgggccttagctgccttcccgcgggtcagggcttgggacctgcagcccgccatgcctgagccttcccccgcctccgtgggctcctgtgcggcccaaacctcctcgacgagcgccacaccctactccacagcgcccagtcccatcgaccacccaagggctgaggagtgcgggtgcaaggcgcgggactggcaggcagctccacctgcagccccagtgtgggatccactgggtgaagccagctgggctcctgagtctggtggggacgtggagaacctttatgtctacctcagggattgtaaatacaccagttggcactccgtatctagctcaaagtttgtaaacacaccaatcagcaccctgtgtctagctcagggtttgtgaatgcaccaatccacactctgtatctagctactctggtggggccttggagaacctttgtgtccacactctgtatctagctaatctggtggggacttggagaacctttgtgtccatactctgtatctaactaatctgggggggatatggagaatctttgtgtctagctcagggattataagcgcaccaatcagcaccctgtcaaaacagaccactcagctcttccaatcagcaggacgtgggtggggccagataagagaataaaagcaggctgcccgagccagcagtggcaaccggctggggtccccttccacactgtggaagctttgttctttcgctctttgcaataaatcttgctactgttcactctttgggtccacactgcttttatgagctgtaacactgaccgcgaagatctgcagcttcactcctgagcccaacgagagaccaccagcccaccgggaggaacgaacgactccagaagcgccaccttaagagccgtaacactcaccgcgaaggtctgcagcttcactcctgagccagcgagaccacgaacccaccagaaggaagaaattccgaacacatccgaacatcagaaggaacaaactccagacgcgccaccttaagagctgtagcactcaccgcgagggtccgcggcttcattcttgaagtcagtgagaccaataacccaccaattccggacacatcatcatctaactaaattcaagtgagaatgaggctctttgattatggttctggcaatgcagacaccctcctccaaattctgtgtcttacagtctggagcactacgaactacaaagaaaaggtatctgtcatgtcatactcccaactttcaataacatgacaggtatagagtaaccatgataaaaacaaaacttccattcaaataggagagccgagagggatggaaggcacatagaattcacaggttcatagcaactttgaaatccagccagtcacgttgacagttccttgattgggacccaagtatgttccttaggaatgattcgctgcgaggtaggtccctctgcctgagtcattctcgcatttgtatgagaaatcatctgtgattgcatcaccttccttttttttttttttttttttttttttgagacggagtctcactctatcgcccaggctggagtgcagtggcgccatctcggctcactgcaagctccgcctcccgggttcatgccattctcctgcctcaggccccccgagtagctgggactacaggcgccagccaggacgcctggctaatttttgtatttttagtagagacggggtttcgccttgttagccaggatggtctcaatctcctgacctcgtgatctgcccatcttggcctcccaaagtgctgggtttacaggcgtgagccaccacgcctggccgagcattgattttatatttgaactcaactagtatttgtacatttaccttttctctcagttcttctgaaaaatagaccagttctgtccttagaacgttcttctcataatttattgtatatagtttattcacagaaataaacttttcaaaatttattatatgtagtttattcatagaaataatttcaaactcatttgcatagatatacccatagtcagatccagtaatattttttatactacagttcaggccatagttttgttaagatttctgtctctacatatcattagttatcctttttctcagcctacaataacatttttctcactttctccaagtttttgccgtaactgccgattcccaaggctataacataagtttaatgttttgtcacagcagcactgaatttctagtactaaattatttttcaagcatctagttttatatgaaataacactgtaaaagcagattacaaaaaccacagtcgtttaatttatctgtgtatatatatcttatggttacctaagtgagggcaggtttgttttttctcacataatttcagctgggatggctcaacttgggctggatgatatccttccaagttagctcacaaactggcgaaggtgttcaacggagtttcacagtagttataatacaaatccaaatgagacatctccatgtaggggaaaaaaaagtcagcaaataaccacagaccttggacaaattccaatatgcttcactcttactttgcatcctcaggacattgcattcaaaatacaatctttatctctattccccagtgcctctgtaagataagacaagaagacaacacagaagaggagagtccttctcaaggtgctgctcactcctcagtcctttaatccagaattttctcattcaaaacacccaagtaagagatttcctaactgagcttttcttaaattgatttcatgaaactataggttatattaagtatccgaaatggtatgtaatgatgtgcattttttcttcagtgtaaatccatggaaaatatctttcttctgagtaaattcagtgagttaacatataattaataaactgcttccattgcacccatgtttttcctactctcttccctgtcccttcatgtcaatattccttttaagcttgtacccaatttttcaccctaacacattagttgaaatggatttcctcttttctacctctatctataactgattcttccaagacctttttaagaaacactggtatcagaagttcgataccatcctgggcaatgacgaatctctctctctcatattttgttgttgttgttttgtttttgagacggagtctagctctgtcacctaggctggagtgcagtggcatgatctcggctcactgcaacttccgcctcccagattcaagtgattctcctgcctcagcctctggagtagctaggattacagacatgagccatcatgccccgctaatttttgtatttttggtagagacagggtttcaccatgttggccaggctggtctcaaactcctgacctcaagtgatctgcctgccttggcctcccaaagtgctgggattacaggtgtgagccaccatgcctggcctctacaaaaaataatttaaaaattagctgggcatgatggtgcacacttgctgttccagctatttgggaggttgaggcaggaggtcacttgagcctcggaggtcaagactgtaatgaaccatgattgcatagctgcaccacagcctgggtgacagagcaagactctgtctcaaaagaaaaaaataaagaaggaaaaaaaaaaagaaaaagaaaagaaataaaatactggtattatgagatttttttcctgtcttctgcaggccaaactgatacgccttttccatacaatgcctatgcttctaatagttcccttgcacgacaaaattcagatttatgattccaaactgcctcaattttgcaatatctttatattagtctttgtttccatggcttatacctggactctgcctttttgtttgtttcttccaatctgttaatcctttagatgacattctgatactttaaatttaaatgttagtaatactgatctggtcactatatctacaattcctccatttttctagtgttttcaatatttttgttatttaactagtatttgaatatacaattggcacaataatgacattggataaatgtctgttcactgaatgaattggtagatatttcatcttccaaactaaactagaagtcaatggtcagaaaacactaaatgttgttggactaaatcaaagtaaataaatgaacagtgtttgtgtgtgtgtgtgtgtgagagagagagagagtgaaaaagagaaggaaagagagagaaagagagagaaaagaggtaaagtgacagtgtccttaaaacctggcgagatgctttaaatttctaaatgaccagctttctcctagaaaaaacattaaaccctagaagagtttgattcaacagtttgctccttttctaagacatttagataggaaagttttcatatgcagctgttttatttttaacctttgattattaccattttaaatgttaactcttgttccaacattggccacaattttctggtcacctttatgtctaatttattagaattccttccttgttttcctgacccttttcaggatttatatttcaaaatttgatcattttctatctctgaagtttgacattgctaatattaagccttaaaattaacctttaagtacctaagaagtttttaatatttgctttactttctaaatataaattactgtcttagcttgggatgctataacgaaatactatagactgtgtggcttaaacaacacaaatttatttctcagttctggaagccaggaagttcaagatcaagatgccaaaacgtttgatttctggtgaaggctcacttcctgatttgtagacaactgtcttctcactgtattctcacatggcatagaaagctgagagctctggtctcttcctgttttcagaaggactctaatttcatcacagcagctttatcctcatggctttatctatgcctaataacctccaaaaacccctcctgcaaataccaacacatcaagggttaggacttcaacatacacatgttgaccagagaaacaaacatttagcctataacaatgatttggatttatttatggagaaggaagctatagaagaataactaaaatgcataaaggcaaattgaatgttcaaagggtaagcatgggtctgattgttaatatcactattagctcagctacaaatgagcatctggagcaatagcatctctctaggtttgaagaggtgagcggcggtgcctcagcgatctcctctgcagcataggaaatgatggctgtttctttccgctggaagcatggccacgaaagccctcctctgaaagtgctcttgctgtactgactttgcttgtcaacaatgtggcactcctcacttaacagacactccctacatcagtattgggtgtcctctgaaggaaaactgaatcttccccacctcactttcctctttatgccataactgagttccggaatgtgaaagcctacactgctggatctgctgtgtggacttgaccctgaccagggagctccaaaaaccggtgatgataacatgatgtaattgagagtgaaaggaaggcaactgagaggataagagaacgtaaacaagaggtgagtgtattcccgagttagttatgcaaaagtgaacatcattatatctttgaaagttatttgtggggtttggtattatctatgagaaatgtaccttttcagtgctgagtacagagtgaaccctcaatattttgctggtagtggtatagttgttcttgaatggatcaatgaaagcaattgcacaaggtactgttttggaaagaagaaaatgaatatgcatacagcaaatgtataatatttgaaagaaaaagaggataatcaatctatttagtactaattttgcatttagcacagttcattggtgactgacagtttgcaatttttctactaaatgataatgagaaaacacaagtaatttatattttcacctaaacatcatattactttctggtgtcatacgtcctaaatcctttttttttttaattttttttttacaacttcctgaatgcactgcatttcttacatttaataatgtcaagacttttctctgtagggtttacatttgattttgccacacaatagacaatttctaaggcaacatataattccaatccattaggctaatggattgcagctgctgtgaacagtgggcaggtcatttttcaataatgaagtctaataacacataaaagataaagataaataaactgaaaaaaatgacatgactctatatatagctaatataagtgcttgtttctatttatgtaaaaattcagtgttttttttttctttttttctagaaaatcctactaattttacatggctaacagaacttttaaaacatgaacatctaatacatatgaataattgcattataaaatactcaagaaagtcattagagtaacagactttgctttttataaatcatgtttaatcaatatttttatttccctcttttcaatttctatgtgtaataaatctattgtaattactcaccttcacttatttatcacactagttgttatagattttgcttctccaaaggagcaaagctccaatttgctaccaaattggcaaagctgtctggtggaacaatctgttcacaagaagagtgagacctgataccacagcaacgctgccagaagttcatgattttaactttgacggttttctgtcttctgtctgtctttctgagaaaagtatattgttttggccgggcgtggtggctcacgcctataatcccagcactttgggaggccgaggcaggcagatcaggaggtcaggagatcgagaccatcctggctaacacggtgaaaccccgtctctactaaaaatacaaaaaattacccgagcgtggtggcgggtcctgtagtcccagctactcgggaggctgaagcaggagaatgctgtgaacccaggaggcggagcttgcagtgagcagagattgcgctactgcactccagcctgggtgacagagcgagattctgcctcaaacaaacaaacaaacaaacaaaaaacaaaaacaaaaacaaaaaaaaagtgtattgttttactgttttctgaagcttaaaaaatgacaagttatatatttattattatacctgactgttctgatctgaaaactgaaatcccccaccttggctgaagaataaaaaggaaatgcaaagtactaaacccactggttttagacccatatgtttatatgggttcccaatcaaccatatattcattaaaactgcctttcttaaaataaatattcttccccctttttctataaaacgtggctctgccttcatcgttgttaaaatgtattccatggtagtaggtaagtgaaagtgtctgtcttcgtatatagtaaatgtctacactatttccattgtttattctgagaggttttgttctaaacttatgtttttattcttcatcaatatcaatttatatcaatatatttttgtattgttaatggaaaagaaatatactactctggatgtttacatatatatcacattacatatcaccatattacatatggtgtgtgtatatatatacacacacaacatatatgtggagggtgtgtgtatatatatatatatatacacacacatatataaaataccacatgtggagagtatatatatatatatatatatatatatatatacactatatggagagagagagaaggagacagtcagagagaaagaaaggggacaagtcaagagcagaaaagagaaaagagaaagaaaaggaagaagaaaggttgggggagagaagaaaggataagtactacagacctcgagttacacagaatgtttaatatatatacttggtaggatttgcacacacatgcacacacacccagacacgagcacacaagattcctagagtcgagaggaaggatgtgagaaaatacagttagtaaagcccaactaggaatagagtattagcaacatctatcttccttaaagaaatggaggtagaagagtgagatggggtattttggaaaatacgagatgtctttattctgtggaagtgctgagatgccattatatgaggattttagtgcgccctccccaccagaatttatggtgacatggaggctccaagggagagaggggtttggatctctccatactataagaagaattaaaattaataacagaaatgtgtctctatcaccacctagaaggggagtgctgagggtggtgtgagtgtgagaagcctgaaaaagagtttctatgaattgcagatgctgctgagaactgctggaccagcttccctcctcagccagtctgagtggccaacacattgttggggctcatgctagttcccacagagggagcatgtgtaggtctgaggggacagcacagctgcatgctggccagcagcaggggtgacaggagtggcagcatcagggcagagagctcaggtagagcccacgtggtcagctgcctggctagagagtacaggtgacccacatggagggtgttgcctgcagcagctcttgggtgtgaaggagactagcccatcacactccataggcaagaggtcagaaatgatctcgtccttgggggacagattttagggagggaagccaatgaggagagctcttatttatattttctccctgggtgttcccctggtgctacatatcagaaaagaaagacccccaagtggtcagacagaaaagaccctcagagtgttttcaacttcttccaagtgcacatgggaggaaggtgcaggtgaaaatgctgggcgcttgagaagcaaggatttaagaccatactttggcttaatctatggctggtcctcctcactctgaagttcatgtacagttactcagagcaaatgggaggtcactgggaacaacatctgaagatgaagcagcccaggacctgcccaaatccagggacaacatctacatgggtccatgagtatgcaggacggtgggggtgaagtccagtgttcaagaggatagcattatttggccccaccctgcaacttctaaggagggccctgttacaatcacagcattttcctggaactctttcaggagtgtaaataatgtgtattgggaacatgaggctttctttcaataagcttgtctagagatgttgggctgtcacagtagatagaatggctagaaaatggattgaaatttttactcttcatctgaatagtttgacagcctacagacatatgtaatgttaaccatatgtcatcgccttcaaattcttttcaaaattgcaaagacggtattattttaattgtgtgaactaatttttaaagagccaattacctgattttttttaaatggcatctgtatgtaccagctaaccttgcctaaagaattttaaattattttatagcttgagaccatcttatactgtaaaaatttgaaatctccttcctagaaaaacatttcaaaatagactctcttaaatgtagacattcaatgacatctaaagtaaatggtattttaaatttagctaaatagagtactttagattataacatcctctttcccacacatctgtctcaagtataactgttaagattttgctaatacaaacaactgtgaatgaccttctattagcagaaatcaacttgcaataagctataagatagtactataaattagtatgatttgtggttattgtcattctttttctaaggccttacaagacgaggttaaaagtgggattgaatttggagaagcgtttctaggaaggggaactggtgagggggccccttatccagtttcctacctgggacatactaaatattaatagttgtgagcatcttttcatgtgcttattggctacttgtataatcttcttggaagaagtgtctatttaaatcattttacatattataaaatttaccattttaaagtatgcaattcaagggtgttatagtatactcacagttgtgtagccatcatcacaatctaattttagattattttcaccactccagaaagaaatccattagcagtttcctcctcccatcctctcctccctccagttcctgacgagcaccaatctacttccagtccctatgaatttatctattatggccattccacatgaatagaatctcacaatatgtggccttttgtaaaaatttacttcacttaggttaatgttttcaagattaatctatgttctagcaggtaacatttttcattgaggaataatatccaatttgatacatataccacattttgtttatctattcatcagctaatggacatttggattgtttcaattttttggctgttatgagtatcatgtacaagtttatgtgtggacatatttttatttctcttaggtatattccaaggagcagaattgctgagtcatatggtttaccctttagggaaacttccaaactatttttcaaagtgagtgtaacattgtaaaattccaccaaatgatgtgtgaagttccagtatctccacattttcaacacttattattgtgttttcctaaaatatattttagctactttcgtgggtataaagcagtaatctaatggtttgggtttgcattttcctgaaaatgaatgcaattgacatctttttaagtaaatacttgtccatgtggatatcttctttctggtaatatttattcaaattcttttaactgttttttaattctatttttccatcttttaattgttgagtaatgagttctttatattctggatagtaaacccttattccaaagggtgcttgctttagtcaaactcttttcctttatctactgaggttatcagataattttgtcctttattctgttaatacaggatatagattgtttttaattgaatcagcattgttacatcatagtcttttcttatataccatttatcttaaaatcaaagaagagaaacctgggggaaaatgccctcaaggcaaaaagtatctgtccatctaactcaatacagcattatcccaggataatctatatactttatttattcaaacaaatgatatttattccctaatacgtaccaggggataaggaaatctaaaggcataacatttttctctgggatttcacaatgactaaggaagaaaaatgacaattgtggcacaattcttgtcatttaaacatgatttaaacattacacatctagaaaatgcattctgaaaattctagcgaaaaaatttgtaaatttgtcttttttcttcttcttagtttgtttaaaaagtatagtttatgaggccgggcaaggtaacttatgcctataatcccagcacttgggaagctgaggcagatggatgacttgaggccaggagttcaagaccagcctggtcaacatggcgaaacactgtctctactaaaaattaaaaaaaaaaaaaaaagctgggtgtggtagcacgcacctgtggtctcagctacttggaaggctgaggcaggagaatcacttgagcctgggaggcggaagttgcagtgagccgagatcctgccactgcactccagcactccagcactccaggctgggtgacagagtaagagtctttctggaaaaaaaaaaaaaaaaaaaaaaaaaggtatagcttatggtcccttagaatcttgaggaaaatctaagaaaatagaactaatatggtagtacgtatcttcttccatgataaactttatcagagtaactcaaatacaaaccatagaatagcaactaagctgtttttttccattctcttgttgaagtggtttgagtccttagctggcaccatgatggattggaattgcaagagggggaaacatcgaggaaggagaaaggaaagaggtagctgggagttagggagagcctttagacaggagagaaagtcttaacagggacaacatgtgaaaggagggaggtaaaaatggagattcatagaaaaagatttcaatggtagtgcagctctgaaaatggaaagtctagagaaaagacagtctattagcataattcactgttgagtaggagtgaccaagatttagtaacacttttatgctcaactattgtctgggagcaagtatagtccaaaattaagtatcttctaacatataataggggaggaaacctatgggatcttgcatttggtgatgtggtttcagacccgaaagtacaattgatgatagaaaaaaaggacgaactggaagttattaaaatttcaaatttcttctctgtggcaatgttaagagaaataaaagacgtgccacaaacttgaagaaactatttgcagagcacatatctgataaggggcttgcatccaaaacttacaaaaactagtattcagcagtatgaaaaaaattaaaatgggcaaaagatacgaaaagacacctcaccaaataagatacacagatgtcaaacccaagacaagatgctcaacattatttgtcaataagaaattgcaaattagaacagtgagatagctctacacacctaatataaaggataaaataaaacaacaacaacaataaaaaaaaacaaaactcacaataccaaatgctggtgaggatgtggagcaatagaaacaatgtccattgggccgggcaaggtggctcacatctgtcatcccagcattttgggaggccaaggtgggcagatcacgaggtcaggagatcgagaccatcctggctaacacagtgaaaacccatctctactaaaaaaatataaaaaattagccaggcgtggtggcgggcgcctgtggtccagctactcgggaggctgaggcaggagaatggcgtgaacccaggaggcggagcttgcagcgagacgagatcgggacactgcactccagcctgggggacagagtcagactccgtctcaaaaaaaaaaaaaaaaaaaaaaaaaacaagaaaaaaaagaaaccacatccattgttggttggaatgaagactaatacagccactttttaagacagtgtggaagtttcttacaaaattaaacatagccttatcagatatttcatagatggtgctcctgggtacttacccaattgacttgaaaacttatgatcacacaaataattttatgtaagtatttacaataactttaattataattgccccaaactggaacagaccaagatatcctgcatagtgaatggataaacagactatatacaaagaaacattttcagcaacaaaaagaaatgcactatcatattatgagaagacacgatgaaaccataaatgcatattgataataaatgatgccagtctggaaaggtcccataatgtgcaattccaattatatgacattctggaaggggcaaaactatagagacagtaaaaggatcactgattgccaaggattggaggagtgttgtatgttaagggttgagtacttaaaacatttagtactcacgtacccctgaacctaaaagttttttttttaattgggtaattttatagaatgctgaaactattgtgtaagatactgtaaaggtgaatgcagagattatgcatttgtcaaaatctgtagaattttacaacacagtgaatcgtaaggtatgcgaatttaaaaatatcatttaggctatggagagatctgaagaaggaaggcagactgggaaaatccagctatattacaaatgtctaaattaatctcacagaagaaattggtgatgcaggaaaggtactgacctaagtaactttgaaagtaagtgcagtctgcaagactaaagacaaaattaactgcaaatatacccccaccacaccacccaggggtgcagttaacaattccgaagctgctatacatgtatataggaattgaacgattaagctagtgaatggcagatgatggttcaaatttggagtaggcttttacagcaaaacaataggaggaggctaggatgatccctgcataatgggttagagctggagacattactaagaactcatgtttagcttaatatggatacagttgattacatattagaaacatttattgatatattaataggtgcatacctagattagtatatgcacatatgtttcattttttgtccgctgagagtggctaaaataaatgacaccccagtagtatgaaatatacctactgcccagatcatagttgttgatatcataatccacaaaaaggaacagtgtttcctggggagatggctgaaactaggatgaaagcaggaaatttataagcctgaatcaccctgtagtgccttaaagtaagaaagagctaaaaataagaaacaaaaataaacccattccagaaaactgaggttagggggatgcacaaggagccaacaggcaaagctgaaacaatttgagcaacagtagttaaaaagtgcttttggatgataacctgaggtataaaataaacatgcatttatactgatataaataaattattttgtaagttaatagggaagaagagatcaaagagataaatctcttgcacagtggaatacctaataatctatgtagatactctgccatcaaggaagggagtataacttctcccttcttttttttttttttttttttttttttgagacagagtctggctctgtctcccaggctggagtgcagtggcacaatctcggctcactgcaagctccgcctcccgggttcacaccattctcctgcctcagcctcccgagtagctgggactacgcctggctaatttttttttgtatttttagtagagacggggtttcaccgtgttagccaggatggtccgcctgcctcagccccccaaagggctgggattacaagcgtgagccaccgcgctcagccaacttctcccttcttaagagtccgctgtgcattgtgacttcaatccaaagagttcaatatggaaagcaaaggggcaaaaaaaaaagactaatgttatggtggagaaacttgacaatcactacttcagtcatgtgatcaactctaggtcagcaatcataaattatgttagtggtatgttccctcagtacaatgtaataatcatggcacttcatgaacttctcttccaaacctataactttagtcaaatcaaagaaaaacatccaaaaaattccagtaaagcagcatgccataatatacctaaccatattcctcaaaattctcaaggtcaccaccaacaaagacagactgagatattgtcaaactgaagccaacaacaaaatgaaacgtgggatgctgcaaggaatcctggaaaaaaaaacaaaaaacaaaaaacatctatagcacacagcatcaagttccaccggctttagtggatatgcctaaattgtttcccaatcttaccacctacaatttcatcgactctccaaaactatcttgtgaagtggaaagagaatggattttttagtccactttatatttagaaaacaacaaaaaaaaatgaatctttaatgaatcattaagatgaatcaggacatattagtaatatggaaaactggaattaaatctgaagatgtggcaatcttgtacttaaaataatagtgcagtagcagctgtagagattgagttgctgttgcagcagcataattgatatcaacatgtcttagacgtgaatataatgtaaatattgctaattctctattttagcataccctggaattatctttttgtgtcatatagaagcaatgcagtagagagcaaccaatccaccatgattgtttcctggcatattttctttaatcattatcacatagccagcggatttatttcgaccataatagcagatgatttattattttgaggctacagaatgagacagctgaaagggggttttgaaatggaaattgtgacatttactgtgggagcaatgatcttatacagaagccaggtggtgactgtttaccattcagacagatggaggtcctgcagtagagttatttgtgtgtgtgtgtgtgtgtgcttattttttttctgttagaaaaattagcttaaataattcaagtttctttttttcttccttgctagactggtgcactgtgcaaaacgaagtattaaaagactttttctactgagcaaaatgcagttttgtgtatatcgatttccttttgtgtcaccgcaattgttttagccatttcaagttttcataacactgtagtgaccagttaacatgaccaaatggtagtaaggatcccatgcaactataattataaagatctatgacaataatacaataaacatttgtctcaggagaattgcctaaattgactttctatgtatctttcagacagtatgaacattaaaacaataatattaatatttcttaaacattcggcctatttgcttagaaattttatagcaagccctactgctaaatattgaattgaagaggtcttcgcatgttatagccaaatttactctttgaagtgtgcgttaacactcattttgttagtttttgcgtgtataccctgtagttatattctgaaaaaaaggtagatgaatgaaagtaatagatagctgttgctcatacattttaattatgtgaattataagttttgattgtccacatacaatgtcagtactagaaggaaactttgattcatctaatctaaccaatgtggtcaaataaagctaaggataatgtcatagattacgacttcacttattccatgaaagtctagactccacaatctgataacctacacatttctaatttatcaggcaaatctgaataaaagccatcataatgtatgtttggccaagagattgtgatgtggtcagaaactgccttggggtgtaccacagtcagctcatctgacagaaaagacgcctgttcttggccaaaaattaaagaagcattatatccttaaaatttatggaatcgtcttccttaacccaattgaaaacatagctcctagatgcattttaaaaaaaggtaattttattttctttttcttttttcttttttcttttttttttgagacagagtctcactttgttacccaggctagagtgcagtggcacaatctctctcactacaacctcctcccaggttcaagtgatcctcctgcctcagcccccctagtagctgggattgcaggcacccatcaccacgcctggctaatttttgtatttttagtagagacagggtttcaccatgttgaccaggctggtctcaaactgctgacctcatgttctgcccgcctcaggttcctaaagtgctgggattacaggcgtgagccactgtgcccgcctgagtcctatataatattttaactacttgcttgttttctccttacctatgctgaaaagaaagattcatattagactccttgatgatagccttttcaatatgaaacatgaggcatgcaaagaagtagtaaaatgatatattaattaaatcttaatattattaaagaagtttaatttagatggaaaacattaattatatgtttagtggaggcaagagacagtttacctgccatatgtggagcatctaatagttttccattttgtaaaaagtgtctctctaattgtacatataattaaatgcttatatatacactgattttaaagtatccaggaatctacacactgcatgttaaaaaatgggtgtatacttttcatgcaagttatatcatttttttctccttttcttatctaggtattttgagattccctcaatgcacttgtataacttggacattacagaaatactaaaagagatactcacttgctaattatcttggtcccttctggctgcttagcaaaatatcttagactggacaatttttaaacaacataatgtatttatcaagcttctagtggctagggagttcaagatcaaagtgtggaaagattcaatgtctataagaacattttgtttcaaagatggtggcaaaagttagggaagagggaggggtaaataggcagggcacagggaggtttcagggcagctaaactactctgaaaatattataatggtgcaaacatggctttatatatttgcccaaacccataggttgcataataccaagatatctttgttggactttggatgattatggtgtgtcaatgtagactcatcccttttactatatatacgaccctggtgggagatactggcaatgggggagttatgcatgtgtgggcgtggaaatgtgtgggaaaccttttatatcttctgctcaattttgctgtgaacctgaaacatccctaaaaattaaagtgtattaaaaggaaactaaataaaacagacactaaatgtttgtagataactcatacatagatatatcagtaattctatccgcatgcatcattgttattacttgactcaaaagttttaaataattctttttggaaaatgaatcaagtgacatcttattcaaaatgaaaaactatgtaataaatcactgttgtaatacagcttactcaactctgtatttgttttctattaccacaaacttaacataaatttgtctcacagttccataggccagaagtctgaaatgggtcttacttgacaaagatcaaggtataggcaggctgtgtttctttctggaagctctagtaagtaattcagttctttgtaacaacattcaggttcgtgagagcattcagttcagtttcttggggttgtaggtccctgtttcctttctggttgccagggaccacctaccttccttggcttactgctttcttgatcttcaaagccatgagtggtaagccaagcctctttcacattgttaaatattttctgtctcttcttttgcatctctctgatgttcctatttttcttcttccattttgaaagcctcatgtaattactttgggccccatagataattcagaatgatctcctcatattaggatctacaatgttaatcacctctggggtcctcattttgccatgtattgtaatgtatttacaggttgtgtgattaaggtgtgaactttctggatgtcaggcattattctgcctaccacaagttcacatatattaaatatactgatatggtttggctgtgtccccacccaaatcttttcttgaaatttagctcccataatccccacgtgtcatcggagggaccccgtgggaggtaattacatcatgagggcgggtttttcctgtgctgttcttgtgttagcaaataagtctcattggctctgatggttttataaaggacagtttataaaactgtgaggcctccccagtcatgtggaactgtgagtccattaaacctctttctctttgtaaattacctagtctcaggtatttcttcataacagcatgagaacagactaatacatacttatataagtaattataagtatattatatgtagttcagaaaataatttctaacttttctatgcaatagaagatggggattaaaattccagataattaagttgataccaggacctcactttatttaatctcttaagagattaattaagcataaacatttacatatagttaatggtggagattatgctgctattataaaaggtaaaattttgatcatcacaaactatatggaaattattaccctgaatttcaggataactatttatcacaattaaataagccagacaagaaacagatactgtaaacagacagggaagttctctagggattataggattttaatcaacttaagccatcagcctgttttatagcctcgtgccctctagcctgtttcttcctaaatcttgtgtggaattcggtcacctaagtgggccacctaagctcctggcagactccagcaacttatagatgaactcgagtaactttccttattcctgtactaaagtctccgccccaagaggagatatggttttgttaccataatatgccacctatgtgcaggcaaagtgactcactgcttttgggcagcaaagactccttctctacatgtgatgggcaccctctcccctctccatcacctcataaaaccctcctgtcacttactctaggggagatactgctctggagaatactcctagttttctccttccttgccaggcaataacacccctcttgagaaaaacctgcatccttgtgaagagtcattggttactttccaggtgaatgaaccctgtttttggggggtaacaataccacttcccaaagaagaacaggtaatggaaaagaattatggtagcagtccagactttagaagataggtttgatgaacacagttgtagcatttgaaaatgaagaaataagaaagatggctaaataactggcagatgtttgcaggctgtctagaggctacttgcagttacaggaaaagacagaaaaaagattttggagaaattcatatgtaatatattttgaaatcaactgggattatgaataaatttcaaaagtatatgttttaaaagagaatcataggcaaagcaattgaattactaattactgtacctgcatatacacatcaatataagtatacagatatatatgtgtgtatgtttgtgtgtctgtgtgtgtgtatgtatatatatatatatatataatatttatatgtaaataggtcaggtgcggtggctcgcgcctgtaatcccagcactttgggagactgaggtgggtggatcacaaggtcaggatttttagaccagcctggccaacatagtgaaaccccgtctctactaaaaatacaaaaaattagctgggcacagtggcatgtgcctgtaatcccagctactcgggaggctgaggcaggagaatcgcttgaacccaggaggcggaggttgcagttagctgagatcgcgccactgcgctccaacctgggcgacagagtgagactctgtctcaaaaaatatatatgtaaatatatagaaaaatatacgaaaagcatacaaatatatgactgcacactagatattgacactctgctaattgctaataacatgtatctatatttataaaattagtttcaggctctaagcaaatggttgtttttccaaggttattagaaatataatgaacaataatattgtatataaatgcacataaatttagccttttgaaggcatgcatatatatctgaatgtgtatatgtatgtacatattcttgtatgtgtgtatgtgcatactcgcccttcacagcatcaagaacactgggaatactgtatttcaaaagtagaaacaaaagtcagtgatttgggtaagaattgaagtgatattaaccaaatgaacataaaatgcttagtgtcttctattttagtcatcttctagtaagttctctgtagtagatttacacatcagaactaataataaataagaagaaatgaacatgttactcttacgtatgttttattttgaattccaatgtagatatctgtgatacattgaaataaatcagtattttttcttaaatttcttaaattttctaatttataaaataattacgaatatatgatttctgatccactacccacattgcaattttatatttcactatggaagaaaaaatgtccacctattacttccacaagccccacagtaaagcatttagaaaaagagagttctccagtgcagtgttacttatttaccattgatctaaacaataggcaaagtgaactatcgttaatcatatttatttcccttctttgaaggaagatctcattattacaagtcaactaacaataagggtttattactagagagtcaaagtttttaacatgcaatagtaaattttgtagatctatatagtaatttcaggtaataagtaataagacagatataattttacaaatcagtaaatcaaaaatacagagcccatgcaaactgggctacaaaaatcctgatcgctactattatatatgtaataaactcaaacagtaaatgacatgagcattaatgcatcatctgattccagaattcctaagttcattagcctttttaaaataaaatttgacccttatgtaatattaatgataacctgctacatgcatattttaaaatacattttaatgttggtgtcactgtttcaactgtaaagacagggcacattttaaaaacctatatggaccacagcagaatttaaaacattacattgcagtggttgtgattttgttaataacaaaatcagctctgacatttttattaaaaagtttttttattattatctaactagatacagacatgccttatttacctagaaccacaaatggacactctatcacatagacctgctttttcaactagcatgtgattcactcaagtcttagtctagaatccccttgtaaccagtttctgttggactgctctggtagaacagtagtcatgaataacaaataaataaacactgaaaatctctattttaaaaggtgtcttgattttctatcataaaaggaataagtgtaggccaaaatctgattatacattactcaagataaaattatattctatcttataccagaaaggactgcaaaaagtaaaaattccacattgttaagcagcattaaatgagtgcttcttatttactaaattattctgttgagattctaatactattataacttgttaattttcaaatatatctttatcactggtctgtaagctccttaataatagggattatgctttttatccctaagattaagatttttatccctaagatctacactcttcactttatactagatgttcaatagatatttgactcataagtgaataacctgaatttttaaaacattaatgagtttttactttttgtgcatttatcaactttaattaagaaattaatttggccaggcgcagtggctcacacctataatcccagtactttgggaggcaaaggcaggtggatgatgaggtcaggagttggagaccagtctggccaacacagtgaaataatgtctctactaaaaatacaaaaaattagccaggtatggtggtgcgcacctgtaatctcagctactcgggaggctgaggaaggagaatcacatgaacccaggaggcagagtttacagtgagccaagttcacaaagttacactccagcctgggcaacagtacgagactctgtctcaaaataataataataattattatttatttatttatttatttacaaatacgtgtttattgaatgcttataataggcaacattgtagggcacaattggacataatttatacatttgggaataaagtagaaaagcatttcaagtaagtttaacagaataggaaaggaaccatggttgggaaaagttaagacatacatggtaaggatggtggctcagttcagtcaatataaaaaaataggaattatgtttgtgacacccatacaatagtcccatagaactgatgtttatagtttctctggaataaacatagaaattgaccctcccagtcttacaacttgaaaaagttacatttgttttatctgagttcctttatcaggaaatcgaccatcaggcctcccagatagtattagggaatggaaatttatcagatcaactcatgcggacaaggagaagccagacccctggcccatcatgactgcctaacccaccttctgccgaccaattgcctaacctgttgaccaactgctctaccttatctctccctaaattctgttttttcacccatggttacatttcttccctgctatataaacccctcattttagtctgtcagggagatggatttgagactcccttctccttaccaacagcactcaaataatgtcttctcccttggcagtacttattatttcagtggatggctttctggtcagggagcagcaggacacagacagaactcttgctgtttgggtaacatttgtaagggaataatatagtaaaagtattttgagacctggacaatagacaccttaagagttgatacatttgaatatctttgattgtagaccatgggaaacggagactgagaatttttgctgaaataaagaaatccttagatttgtgcttcaagaagtgtaatctgccagtgaagcatgaaaagtatcacagaaacagagaatggaggcagagagacaaacgtaatggttctgcctctatttcaaacagaatattaaggccttaaggatggtggaaataaaaatgaagagatgaaaagaaatggtaaatattacaaaaaatgtataaatagaacctacaaatacagtaaatgtggggaaaatgtacagaggtttaatcaagcatgaggctcacatttatatagtaaaactgacactagaatggatttcatgtctttagtatcataaatttgacgtggtaaaacatcacaatatttttattcaatgccacaaggcattcgagtttgaaagctaaccaagtagaaaaaaaaatggtaaaaaggatagctgcctcagtttataacatattttttcacagtttctcctggcattaacaacaaataattcttccttagggtgaaaaatgtaggcaaaactactacttggctaaaattgctaaataagtcagcccagtcttatctgggccgaacttgtatttcttggctaatggaagttggttttgtgtgtatcaccaatcatgaatcttctgaagagtttatattttctaaaattgtatattttatgtcttatataataaaatgtatgagcctgaaggtttggagaccaggttttagaaataattttacaccctagtgcttaaatatgcaatatccattcagtaatttagattaaaaattaccaaagcaggattcctcttgttacgtttgtaccataagttagctttgtcttactttcttctatattctcaatcagtttttgtagataaaccctttttttactactgtcaagttatatgcattaaatttattaaccagcaaaagtatttaaagagggccctgctagatacatattttatttttttggcatgcatttgcataagtctgtcaaaagagtattatggctcacttttaaacattctagatccagattttttcctttaaatcttgtaggatgcatagtagaaaaatcaaatgttattacggttaaaatataaaatgatccacactaaaattttaaagagtttaactctttaaaataaagagaatcaaattcaaaatcataggcgtgtgaaaagaaggcttttatttttttttaatagggtgaacatagaaataaagaaaagcacctgttttattgtttgcagctatgtagtggccttatttggtctgtcccattggaaagtgcctagttatataactataagttaattggcaacctgctattggttaagcttaactttctttttttttttttttaaatataggcatttacacaaaacagcctaaattacatttcacttatgtttgcatatcaaacaaggttaaggccactttcaaggcctgtctttttctgctcagggattattttcaggcctagtctccatttcattttacttaaactggaccaatgacacatgattacaaattagaaatgtataaatacaaagataacagtgtgtagtttatgagacagataggctcataaactgcatttcttctcacacccaacttatctccatgtggtgcacctacctacatcctaaagcaaaaccttaaacgcctttaaaataatccaatggaaggaaaaaggggaaaagaaaaaagagagaggcaagaaagaaggaagcacaagtgatggtagtgaaaaggagagacacatctcttcagttggaacttcctacaggaggctttgccaagccaccaagtgattaattcagattttggctgtggctttcaggaaagaacaccttggaactttactactgaaacaggaaaagttcctttgtccccctcgcagggcgtgcaatgggggtggggctcacttatacagcaccccactgctcagacctctaggggagcatacagacgggcagtctgtgggggctccaaccctacggcagtgtctaggggtgaatgtttacagctcctgaagccccagtgggcgtgtgttacagggttctcttttagtttggtgtttataggcagcctgtgtcaaccagctcaattagaccctctatcttgtcacaaggacagagggctttctgtaacctgggttcttgccctggtgtactggaagaattggattacatgtgggcttggagaatgaatgcaaagtttcattgagtggaagtagctctctgccgataagggagccagataggagatggattcccctggagttgagccactcggtggccctggttctcctcctactgcacagccaaactccacattgttccaccagtcggtggcctgctggcctgctggcgcctgtcagcatgctcttctgctggcatgctctcgttgacctgctggtgcctgtcagcatgctcttctgctggcgtgctctcgttgaccagccacttgtgtcttctttcgctgatgtgttcttcacgatgtccagccacttgtgtctgcctgctagggtctaagatttttttataggcccaagataggggcgtggtgggccgtggtggtcttgggaaatgcaacatttgggcacaaaggcaggaatgcctgtcctcacctaggtccatgggggtgtagccctagccagggatcacacccttctctacccagcacttcttcccacttctgtttcatttaaagggaccatgctcttcccttcccagcactcctgtatcactactcataaacaagacgaatatgcaacaaggttagttaaaaaaataaagttgttggctgggtgtggtggctcacgcctgtaatcccagcactttgggaagtcgaggcgggcggatcacccgaggtcaggagtttgagaccagcctggccaacatggtgaaaccccatctctctaaaaatacaaaattagtcagacgtggtggcacatgcctgtaatcccaatgactcgggaggctgagacaggagaattgcttgaacccaggaggcagaggttgcagtgagccaagatctcactccagtctgggcagaaaagagtgaaactctgtgtcaatagtaataataataataaggctgtcattttattcatttctaatatacacaagtaaataaagaatagaaattcagcattgtttttctaaaatcagaagacatccattagcccctgacccctaccccaacctgcaaatagttagtaaagatcaattatgtttcaggcccactggtaaatattaatctggctgtgtcctgaagtagaaaagattgagactaattgaagagtctggtgggactccaggataaggaattctttagaaaatttctactaacccaagtgtcctcggagacacacttgggttagcagaaagctggtagtagggcctgtctcagagggctctggggcacaatgactgagaatttaggagaagcccacatagcaacactgtgcagtggcaaaggatgccacagcaatgaggacttcccaatgatgccacgacaggtgcaggtgatagggaaaggaggcagagaaattctaggcagaaaagggcaagtccccataaaacctcaccgtcaagcctgaaaccacagctcaaagtgagaacttatatccctattttccggcctgaatgtcacctttttctaaaccaaccatggaccaccctgtccccatcttgtgccgataaaaaccccagactcagcccgtaaagagagagaaacaactgggtgctagagagtatggctggacatcagagagaagtggtttgacttcagaaagagagcttgatggtgtaactccagagaagaatccagcaggagatggccagacttcaggggaagattagcttcccaccctatcttcttttctgctcccttttgactaagagccactttcatcggcaataaagtcccctgcatttaccatccttcaattcgttcatgtgacctaatttctccgggatactggacaagagctcgggagccacgagtgcagatacaaaagaatgtcgcactggcccttggcccttgctggcagaaggcaactgccttatgtgaagaggcagagacccgctgagcagttaacactcaggctgtccacagacagcagagctaaaagagcactgtaacactctctctggggatccaggggtcatgggcactgcccagatgctgctgcaggacctgcatggagttcgctcctgcagctcccaaaagctcttgcctggctcctgtacctgctccccttcacactccctcccatggggggtggaacacagcaggtctgagtgggtggagtttgcccttgctggtgctgaagtggccggctggttccatcactcacgcactccagttctcccctcattcacttacgtgtttcctctatgaggagttgagagctgcaggctgagtggccaaggcagcccgtcatgagtcccgtgaagggatcagggaaatatcctgcttcagaggtcccaacatagaccttcctgtgactgtgggagcctgtgctcccagctattgaggtttaaacacaaaacagaatcaatcactaagatcctactttgtggcaaactcattgagttctatgattgggactaaaatatttttgcattaccattgaaattatttaaatacttcctttatgctaacagttgctaaacacaacattcttgacatatggctaaacatatttaaaatttattaacttttcatgagatgaattatagttatattttatatgtaaaatatgaaaatgttcctcatgcgagcttgctaattaaaaatattttaatgttatacaattaaacgtgtaaagagaaaaaaagtcaaagactttactgttaaagaaatgtagtggctgggcatggtggctcacgcctgtaatcccagcactttgggaggttgaggcagggggatcacctgaggtcaggagttccacaccagcctggccaacatggtgaaaccctgtctctactaaaaatacaaaaattagccaggcatggtggagggcactggtaattccagctacttgagaggctgaggtaggagaatcacttgaacccgggaagcggaggttgcagtgagctgagatcacaccactgcactccagcctggacaacaaggctagagtccgtctcaaaaaaaaaaaaaaaaaatttagttaggaggatgaatgcctgtgtgtgctccctggcgaaaaaaataaaatatatactttgtatagctctagagtggtaagggataagagatcttcaggggcatctagtccagtttccatctgatgttgaatcacctatctaacaaaatgccagacatgtgctcacctaggctgtgcctgaaaactttcagtgatgcagacaatattatggcttaaggttctgcttctctagaggcagtcagagttatccgtggacagctctgagtggtggaaaatttctctttacatttagctaaaactgtgttccctggagtttcatctttttcattccagtttgaagcatcagggctataaggaacaaatcaaaggcctcttgcacatgaaagcacttggtctatttaaggagaactctcttattccccttgagttttctcttctagagattcaatatccacagtttctttgaggaggcttcatctgtcatgttgtcaattcccttcataattttagtctcctcagctctgaatgtcttccactttgtcaatatctttcttaaagtctggtgacttgaatggaacaaacagattcggccaaatgacaggcagtatactgtcactttctttgtcctgggcttctgtcgcttttctcattttacatgtctatcagtgtaaccaagttcaaaatggctttttaggcagtatgacttatgatgattcatgttgttaacatgactcactgtggccttgtattgggtttgttgtccataaattgtcaggatactttttaaccaatactgctactcttccctctatttgtgttaaatcttgtttttcctttttttttttttttttgagacagagtctcgctctgtcacccaggctggaatgcagtggtgcaatctcggcttactgcaagctccgcctccagggttcacgccattctccttcctcagcctcccgagtagctaggactacaggcacctgccaccacacctggctatttttttttttttttgtatttttaatagagacggggtttcaccgtgttagccaggatggactcgatctcctgacctcgtgatctgcccgcctcggcctcccgaagtgctgggattataggtgtgagccactgcacccggcctaaatccttgtttttcatctgagaacctcacattaaattcagctaatttttatatataatcttaaattcatctgtctggctttccaagaaaaccgttgtctcctggccctgtcatttactacctctcccagatttcagaaatattattagattctagagtgcatgattctttgctctcaagtgtcaaccacataacttagccaaacagaaaatcacaatcataatctaaggatttttttttcaaattgcctcagaaaaacttgattatctcagttatcttgcatttattctctccacatttttattgttaaaacctaggcaattaaaaattgtctattggactagaagcttcatgctgttctgtgtttgggtttccgttgtgtatctaggatctgacaaagtgagcacgtgctgaatatttatttaacacatgggttattgatgttatttgcatgctatgctggcacatgctctactgctatgaaaaagctgtacataaataatttctggtggttagagactcttagtggagttaccttataaaaatatttgagtcgataagacaaacaaataaaaacattcacagggtaactcatcttaaaatgttacagaaaatagttacttaaaacaatctaccatttaaatacaaaaagcacacacatgtttgacacataataaagatacagctgcattttcaggaagttgttttataacatcctaaaaatagttcaattatgatgttaccgtgtatcaaagcagaaaaggagagaacaactttaagccaattaaatgggcattacaagcagctgttccagaaaaggctgctggcattagaaaaggctactgctatacagaaaattatttctttcctttttttgtctccctgaaagatgcaacatatacggattcacatcttcatatgtggcctatctaagacataaaatcttttaaaagtgttttctctatgctgtcaaaactctatgagccagaacttcatgcaaaatggtgtttattttggtgttttgtcatcgctctcctaggtcatttgaaaaccagaaaataatgagtttgagaaaaaaatccttgatagataaacactgcatagaagagcgctttaagaatctaggacttgaataaaggcttacctttaattttaaccagatttctccatcagtatcggcatatgcatgtaaagagatatttcaggatttttaaaaaaactattaagattcaatacctcttgctaatcaaatacatatattaaaaatatcattaagaataagcttgcaagctgatgctgttttcaaatactaatcatagccttcacagtacctggaactgacaggtgccattgtgtgaaaatcatgaaatcaaagaagccatattcattttcccttgaatgtcacttaatactgcaatgactacatctttgacttaactaccgctattgtgagccaatatttgtggttaaattctttcttttacattgaggggaatactctaatttactttctggagaataaacaaaaagaacagatctttctgatcataacctatcgccttgccaatggtggtcacttaaaagtactcgtccaaccgcaattccaggtacaagtccaggtctgtgagaatattcatcagctttcatctgcagtgacattgcttgctctgtgtcacactaagggtgcttgggaagcctgcattagcagcgatatcaagactctactctttgttcatggactgcagggaaatatttgcacaaaaaatatgattattgtaaatatgtttcaaaaatattaacatttacatgtcactaatttcaacttgttttaataaactgtgatctgagtaacatttttgccaagcactaaatattggaaatactattcttaaaaatgataattcatactagttatactcattcaagtacttgtgtgactcaaagtatcataaatcataactacagagagactttaaatatcattaacttcatttccctcattttataaataacctgaagccaagcaagatttgttaggaagtaatgtaacccaagatggtgcatcagtatcctgacttccacacaattgcatttttttttttttttggatggagtcttgctctgttgcccaggccggagtgcagtcgcacaaactaggctcactgcaagctccgcctcctgggttcatgccattctcctgcctcagcctcccgagtagctgggactacaggcacccaccatcacgcccggctaatttttttgtatttttagtagagacagggtttcaccatgttagccaggatggtcttgatctcctgaccttgtaatccacccaccttgccctcccaaagtgctgggattacaggcatgagccatcacgcacggccacatttgcacttttgtatgttaactacctctgcaaggtatgaaaggttgaattatattcaggtttaaattaaagaataaaataatgttactgaaacaccaggagttttgtctaggtcctgctgcttacaacacataatgccagtcataaagacaagaagtattgcagggaagaggcttcaatctggggcggcagctgaagagatgggagatcagtctcaaatccatctccctgactgactaaaattagggatttatatgggaaggaagaaatgtaaccatgtatgggaaaacaggagttagggaagagtaaagaaaaggaattggtcaatatgtggtcaggtgatcatgatgggtgagaggtctggtatctccttgtcagatgtggtgatctggtgaatgtcagttccttgattctatcttaagccctgatggctggtttcctgagaaaggaactcagataaaacaaatgaagcttttcaagtttcaagactgggaggaacagtttctatgtttattcaaaggaaaccacagacattggttctatgggacagcttgggtggtttcagtaacatttcataaaccctgagcaatgtcctcaaatgtgttttgttctacccacctagggcccctgcacagctaatttcttgtccagttacctattttctgccatgtctgaatgaaccttttattgtctgttccaggaatggacctgagcccactaaatattatttcttagccagctgacacaatgtaaagttttatgagcaggggatgctgaaaatactttgcagaaagaaagagcttttcttcttggtctaaggtgctcctcatggcagtatctcacagtacatagggtatccccagtgtccagctctgcagtgcagacgacttctctagtactgagtcatgctgcacacacttctccagaaaacagctcctgcaatggatagaagccagcagcccaaagcctacaggataagccaaaagcatccacaggttgttttgtagaggacttactccagtgggtcaccttcgagtgaatggctttacttgacactctagagggcagtttctggcaagttctacatgtgtgatgcctcagctacttctctgccattcaacaactgtgccctccctaacaaggtctgactttgtcaggagagatcttgatagggagggtctctctaacaaggagagaatggggacctgactcaagtgccattgattgcccattatagtttctatcctacatttttagagttctttttacttcttaccagccaattcctcattaatccaatctcctagtatagttaacatcctttttctttgctgttcaaattgctcggcagtatctgtcttctcattgcacccttactgatacacttctcttttcctggaagttttaactcttcccatattttcttcattattttatactcatcttcctgaatccagctcaaatgtcacattctcaagaaagactttgaaattcaccctgagatgaatttatattttttcttcattgaccttattgttccatatactttttttcatagcctttaccacagttttaatgttatatatttctgtgactatttgattactctgctattcatctcaaatttctatgagggaggaaacagtatttctgtctctttttgtcaatgtatatttaaatccctgtaccagatctggcacactgcggtaccctgtaaatattactgcaagaataaaacaacatctttaataaagctttagattgactctcaaagtttggagaacttctagagaaacagggtagtttctgaactccttttggaaaagcagagaagccctgaagatttaacgactaagaatttaaaaatatcaggttggtgcaaaacctaatgaaactactttactttcaatggcaaaaaccacaattacttttgcaccaatctaataaataaatctaaatattggttatggtaattaaaattaaaattgtctctacagagtgaccagtgaggtagtattctgtctctatgacctattctggtcttgctaaaacttccacatcatttctggattccaaaatctctctcaattattttcttatttacatgatttgaactttttcttcatactatagccaactattaaaataatatgcaagttcctcagtattctaaaacatacttcagcctgaaagtacatttaatgattttttaatttgattagtgagaggataatgaatagtcacgtaatctgttcctgatttttgtaagcccagcactgactgtgtattatcccatcctagttttgtctgatttttattcttgccttttattgctggttctcctccgctccgcatctttacaaggttcctagtttgtttaccagccatttttctttactctccagagatttatttataaaattttcctaaggcttttcttatctcaactattctataacttttcaagaaatatttacttaatgccaactgattttttttatattaatgaatctccaaagattcttaatttgatgatttgacttgcatattttcttatttccactataattcaaatatgatctaaacatttttaaatctgtaaagacacattttgtaataaagattccaatatcctaatgcagggggtagtcctagagttacattatgtataacttcatatatcctatgggtgcttaggatatataacactcattctcatcagatggaaatgccaatagtcatgtgaaaatcatctgttgttttctcctcgcttcatggccaaatattcatcattctcatttcaagttaagataaaatgtcaaagcaaatatttattttcctaagtcacaaagtgaagagtctccaggtcatagttcttggtgaaaactaaaaaaaattatgcccaaacttcaccatgctgttattgttctgccttccttagacttcgcttattttgtaacatacaacatgtttcccagtaactaccaggtctagctcctgaataccttctcttattctgataactgccttttgtaaatactcatcttttaagtgctttacctatcaatccctcatttgttttactgaagtcaatattgactgtttatcttatttgtaccacttcaatttaatgaatcaacctactgatttttcttttttccaagttacaataatgattatattttatctctcaaaatattctatttttattctatcctttcttcttttaatttgaaacttcatatgaggatgttttaaagtaataatatctattccatagaaggaaatcttttaatggtcactctacactctaagatatatgctttctagaaatagtaatcccgacttttaaaaatataatacgtatagtcatattttgcactactatgaaaagatagattgatagatagatgggtgggtagatagatagataaatagagataaataacactgtagacaaggtagcttagagagcaaacacttatttctcacagttctggaggttggtaagtccaagatcaaggcactagcggattcagtatctggtgaggattctctttctagtttgcaggaaagtactgtctagatcttttcagtgtattcttactgaataaaagagagaaagatcgctctctttctctttctataaggacactaataagggggctccacccttacaacctaattaactccaaaaggttccacttcccagtaccatcacattgataagagagcttcaccatgtgaatttgggaggatgggagtattcaattcacagcacacaggaatcctgagtagttattttatctactaatcagctacacattgatacaggaaaaggactagaaggcaagtctaagcaagcaattcttggacaaatgggatttactattaacatatacggttttcacataaattgcatgcaaaaaatatgaataccttctgaattattacagctgatctgtagtgtagtagttgacagtaaggctaagaaatgaggccaatatgtattattaataatttgggtgtacttttctttaatgtatagaagcataaaagttattaaagcaaagactgaaaactcatctgatgctctttcatcaggctttgcctaggtttttcaaaaaatatggatttgaactccaataatctaaaacaatgtgtttttttacttttttcctcagaaaattgaaaaaaatctctaaatagagtctgactcaatttttttaagaatgccatagtcactccaccctctatataagggtatcttgtgaaaaaatatataaaatatattattttatatactaaatgcattatatatttataaatatttatatacatataaattatttcattctcatacctccttattaagaggagagttatggggactatatgtggaggaaaatgagaatggggaacatggaaaattatcacaatcagataatataaaatgtttatggacactacaattgcggaatttggtttagataggtctttgtctattcccatgggataataaagtagcttgtgaccaaaaaacttgtaaaactcaagattttaagcatttgagagaaaacacaaatattttaatatcctatgggtggagacaaatggtgacacagtaggatttgtggccattttttaaacgaaatatttttgtggagaggataataatagataggacattatcacactgggaaattgatattggtagaaactaccaccttataagatttcacagattgtccattttgaaaattatcagaatcaaaatggaatcacttacctcaaaccctggcaaaattgagccaggggtccatgaagggaggatcttcatgaatgtatgcctaaaaacaaaactgttacaactgtattagtctgttttcacactgttataaattgctacctgacactaggtaatttattttaaaaaaagaggtttaattgactaatggttccagaagcttaacaggaagcatgtttgggagacctcaggacatttcaatcatggtggaaggtaaatagaaaacaagtaagtcttataatggtggcacaggagggaaagagagggagagagagagagagagcaagtggggaagtgccacacacttttaaaccatcagatctcatgagaattcactgtcatgagaacaccatcaaggaaatcacccccatgatccaatcaccttgcatcaggtgtctccctcaacatgtagggattgaaatttgacataagattggggtgagtacagagacccaaaccatattattctgcacatggaccctcccaaatctcatgttgttctcacatttccaaaccaatcatgtctccccaactgttacccaaaatcttgactcattccagcattaactcaaaagccaatagtccaaagtctcatctgagacaaggtaagaaccttatgtctatgagactgtaaaatcaaaaacaaattagttacttccaagatacaatgggagtacagactttgggtaaatactcccattctaaatgaaagaaattggccaaaacaaaggggctataggccttacgcaagtttgaaacccagcagggcagtgattaaatcttaaagttccaaaatcctctttcactccatgtctcacatctggggctcactgatgcaaggggtgggctccctaggccttgggcaactctggccctatggctatgcaggatacatcccccttggctgctttgacagcctggcattcagtgtctgcagcttctccaagtacatggtataagctgtcagtggatctaccattctggggtttggaggatggtggccctcttttcactgtaccactaggcagtgccccagtggagactctttgtggggtctccaaccccatatttcccctctgtactgtccttgtagcatttctccatgggggctcagccccctgcggcagacttctgcctggacatccaggagttttcatacatcttctgaaatctaggcagaggcttccaaactattgccttctgcacacctgcaggcccaacaccacatggaagccacaaaggtttggggcttgcaccctgtgaagcaatggcccaggtgtaccttgatgacttttagccacagctctagttggagctgctgggatgtagcgtgccatgtcctgaggctgcatagaagaattgggcccttggcccagtccaggaaaccattttttccccttggcctccaggcctgtgactggaggagcttccatgaagatctctgaaatgccctggagacattttccccattttcttggctattaacacccttctagttacataagcaaatttctgcagcaaccttgaatttctcttcaggaaatgggtttttcttttctaccacataatcaggctgcaaacttcccaaacatttatgctctgcttcctcttttacttttctgttttgttttttttgttttttgagatggagtcttgctctgtcaccaggctggagtacagtggcacaatctcagctcactgcaacctctgcctcctaggttcaagcaattctcctgcctcagcctcctgagtagctaggactacaggcacatgccacaacaccctgctaatttttgcattttcagtagtcacagggtttcactatgttggccagaattgtcttgatctcttgacctcaggatctgcctgcctcggcctccaaaagtgccggaattacaggcataagccaccatgctcggccgctctgcttccttttatcttatttatttattgcttctgtttcaaatacaagttccaatttcagaccatctttttcttcacacgtatgagcaggcatacacttttagaaacagctaggtcacatcttgaatactttgttgctcagaaatttcttccgccagataccgtaaatcatctttctcaagttcagtgttccacggatctctagggcaggagcaaaatgcacccagtttttcctaagcatagcaagaatgactttcactctagttcccaacaagttcctcacctccatctgagaccacctcagcctggatttcattgtccttatcactatcagcattttcatcaaatgcattcaacaagtctctaggaagttccaaattttcccacatcttcctgtcttcttctgagccttccaaactgttctaacctctgcctgttactcagttccaaaattgctttcacattttcaggtatctgtatagtaatgcccccctctcccagtaccaattttctgtattagtctgttttcacactgctataaagaaatacccgagactggataatttatgaagaaaagaggtttaactgactcacattgccacaaactacacagaaaacatggctaggaggccacaggaaacttacaatcatgacagaaggcaaagtagaagcaagcatgtcttaccatggcagagcagggaaaagagagagcgagcggggagacgctagacaatttcaaaccatcctatctcatgagaactcactcactatcatgagaactgcatgcaggaaactacccccatgattcaatcacctcccaccaggtccctcgtccaacatataaagattacaatttgacatgagatttgggcagaaacacagagacaaactatattaataacttttcacaaagactaccaaaactttacaccaaaaatacttctgtgaggacatctgcccagtaactgcctgttcaaccttgtactcacaccacccttgttactgatccttgttgccaaactttccttcctttatctccctaaatatgcccatagcttactatggcatcatattccacattgcaatgttcactcccaaagaaacatattatctttggagaatctctgtacatctgttatttaggttgacaaaatatgtgtgtgtttgtgtcagagaggagtgggtgtggatgtgcgttttggtctatgaagttttaccacatctgtagatttggataatccaagaacagacaagatacagaacagttctattacaaggatcccccatgctatccttttatagccatatccacacacactcctatccctaagccctggaaaacattaatttgttctgcatctttataaactttttacctcaggaatgttatatatgttactttgcaagctttttttcttaactcagtgtaatttccttgcattgaattcaagttgcttaatgaatcaatagttttctccttttttattgttggataggattccatggcatgagtatatgatatggtttggttctgtgtccccacctaaatctcatcatgtacctcccataattcccatgtattgtggggtggacccggaggaagataactgaatcatggggccaggtctttcccctgctattctcctgatagcgaatgagtctcacaacatctgacagttttacaaaggggcatttccctgtacagactctcttgtctcttgctgtcaccatctaagaggtgactttcgccttctgccatgattgtgagcccccctcagccacatggaactatgagtccaataacctcttttttttttttttaattgcccagtctcagctatgtctttaccagcagcatgaaggtagactaatatggtatatgacaatttgtttagcattcacctgttgaaggacatttgggctgtttctagctactggatattaattaataaagctgctatcaacattcctgtacaagtttttgtgtgaaaatacattttgatttcattaggacaaaagtctaaggagggaaactgctagatcatgtggcaagagtatgcttagttttatatgaaattgccaagctattttctggaatggctgtgtaattaagcattcccattagcaatgaatgagtgattcagtttattttcaaactcagaaaaaaagatcgtggtgatttcactattttttaaaaattataactgttgtgataagtgtagtaatatatcattattggtttaatttatatttcctagtgacaaacaatgttgaacaaatttttttgttggtttgtttgttttgagacggagtcttgctctgtcacccaggctggagtgcagtggcaagatctcagctcactgcaatctctgcctcccaggttcacgccattcctctgcctcagcctcctgagtagctgggactacaggcgcccaccaccacacccggctaatttttttgtactttttttattagagatggggtttcaccgtgttagccaggatggtctccatctcctgacctcgtgatccacccacctcggcctcccaaagtgcagggattagaagtgtgagccactgcccctggacagtgttaaacaacttttcatgcatttattggctgtctgtcctcatcagtgaaatacatgttcatgtatctttctaattgaattatttttactgtgcattgtttcgagtcctatatacattctagactctggccctttgttgagtatgttgcctgcaaatattttctctcagtctctgcctggtcttttctttctcttcatggggtaactcagagataagttaaaaaacaaacaaacaaactgatgagctctagttaatcaatggtcttcaaccattatttcttcagactcacagacacactctgctttttgtatccatattgaactcttatcataagagcagtgaagcaattccatcaatattgatctgttctcaaattcactgattctgtttcctttcatctctagtctacatttatcctatctagcaagctattttttcctccctgtgattgtattgtttagttctataatttccatttggttctctttaataactgatggaattatttgatattttctattatgtcatctgtttcaaaagaatttttagttgctttttgcaattaaagcatttttgtgctgattgctcctaaatccttgtcagataattgcaacctctgattctgcccagtgttgtcacttgatagtgttttctcattcaagttgatgattttcctgattcgcggtataaaattctgtcttttgttagaagattacaagtcctcctgaagtctttattttagcaggtaaccacctagtctaagtttagcaagcagagcctggcctacttttatggactgtggttccaatgacaacttcatctttagagtctttatggtgttattttgattgcttgttgggtgccttatgataccactgggctctcactggtctttactggtactgcctggtggccagaagatgctttcccaggcctggactcatagtgcctcgatctagaaaagggagtctccagcctttagaaagagtctttccctggcagtgccactcattgtgacagatttttctctcgtgggcgcagcccagtgtctggtgttttgggttggggaggggagtctcaggcacacaagaacaagcattagttgtggcagaattttccttgctgcttctgctcagttgaccaatgtctctcggtaaagaagtgagtctctgacccacaaggatggatggcttcctgggccagcctggttatgatggcaagatccccctgccagtgcttcgagaccccctaggtttcccttaatgtgtgtgcctgtgtgtggcaggggtgagggaggagtgggaagcaaccatagtccttgttcactagccttgtctgctttggtcatcagctggtgtcactatcagtctccattcctgatactgctgggctgacctggtgttattgaaaggactcttattcaatctggcagaggaatgagcctacctgatctgccttttgatgcaaaattggggatggggaagcggtgggcctggcttgctttgttctgttgagtgggcatcaaaagacctgtttctttaatcctgagacctctaacatctgcctgtctttcagagttctctctctctttttattttttctcttacaacttccagtgtttgtggttgtacgtagttgagaggatcaagaataaacaggcctatcctaacttatctgaaccagaaataattttatcttcttttaaattacactaggacccccaaaaagcacacctgctggtagtatccttaaaagtgagaataatctttacataaaatgttggttttatgatcacataaaataatacttaaagtggtagctttaattatcattatctttattatgttattattgttgtcattttatcattattattaatatattatcaaaagttgttgaaaatagtcatagaattctagatcttttgacaaagtgtaattataaaacattagtattggccaggcgcggtggctcatgcctataatcccagcatcttgagaggtcgaggtgggcgaattgcttgaggtcaggaattcaagaccagcctggccaacatgatgaaaccccgtctctactgaaaataccaaaattagctgggtggggtggtgggcacttgtattcttagctacttgggacactgaggcagaagagtcacttgaacccgggaggtggaggttgcagcgagccaaaatcgttccactgcactcctgcctcagcaagagagtaagactccatctcaataaaataaaataaaataaaataaaacagtagtattatattaaagtacataccaaaagagtctaatttaatgataacacaacaggaacagagaagagcatataaatctcacctattatctatttaaccaatactaaaaacaacagtgaaaattaaaatattggaagttcctaaaattttgaaatactctgaacaacttagaggaaattttagttttcataaaataattaagaagtaatacttatattaattttaatatttatattcttcacctaattaaagctgaattatgaaatacaactgtcactcaaacattttaggtttatatttactgtattcatatacgtttttgtttcagaaatgtttattggaagtagtataaatttctatgaggaaagacttgaaaagttttatctgtgaccccaagaagatcacagtcaatgtgaagtaggctaaaaatggtccaagagcccattttagaaaaataacagtctttgttcaaaaaataccttgaaatcattagatatattacaagaagccttaagtatagagtctggaaaagacattgaaacaaagacacagctagactcttctgcacaagtcttctgcgtatcagtcaaatataaaatgaagaaaaataaagattgaaaagctaaaaaaaaattgtatgcaattatattccagatatattaggtcttaattaatgtattgatgatttcaataataaaatgcccattgttgtctaagcaaaaaacaaaacaaaaaaaacagctgtgaaagaggcaacaggaaatttgtaaaaagagtagatcccagggaatggagcaggaaactgaagcttttaaataagggagccagtaagatatttctgataattggttaggcaaagtgcttttaagaactgtgttaactaacattcaacttgaagttttttatgatgacatgatgtaaaccttattcattatcctattccatcaatggacttaacacataattttggaggaatgtgaaagaattttcatagtgtctagaatgtagtgattagcaaacagtgtatatggaacattgtgataacccacacacttaaaacagttctttgaaaatagtcttagctgagataactgggagaagcataatatctcatttttttccaagaattatttgcaataatgaaacagatactgggtcccttagaatacaacatttggcattttggtcaattgcatttgaaatacactgtgaaaattgttcggtattacatggtaattcctgctacattggaatcaggaccaagattattggaccatgataaatgaccttatgtctgcttggagaagtcaagtttttataggtaatgcttcagctgaaattgaaaagtatgtatgactctgtcaggtagacaaggaaaaggcaaaacgtttcagaaagataaaatgacctgacaaagtgtagaggcatgaaaggaataggtatatggaagcaggtagtttttggcatggcttgagtataagagacagatggagaagaatgagaagttggagcttgggatgataggaactctcaatgtcaagttaagcatgatacaaataaaactttattttataggcaatagagaactggagatccttaaacacttttaaagaaagaaggcatgtgccctatcttaactgttggaaaagtaagtcatgcatgtatatagtatagttgggaggaaggtaatgccagcaaaaaataagagtagactatgagagaattccatttaattgatgataggtgtctaaagtagaacagaatagagccacagaagtagaaggaattggtggatgttgaaacattgctaatgagactagaaaaagactgtccacagagatctgagacaatctggaagatgttgatggctttcaccaatttccaaaataaatacgtaagacagtataagctttgatgaggtaggatgaaaagactgaattcagcttgaggactctgtggaatatgtacattgtcagtaatcaggtgatccagaactgtctaggaaggctgatgttttctatccaggaaaaaagataagtgactagttgtcagcaggtagttgaaggttacagtctaaatgagatgactcaagtagatttgtaaagtgaaaagaaaactgggaagaagatcaagctctgctgcacaccaaatgcaccaaaataagtattctttcctgggctggagatttgggaaggtctaaaacataagggaagaagcaggagtagagaaaaaacaaaaaaagcgtgtcaataatcaaaaacttgatcaatatatcagaagttgcagagaagtcaggtaagataaggcctgaagtgcaccctttggattagtgcatgtaaagacactggtgactttataaaaaaataatttcagcgaaatagtaagagctggttctgggatgaagtatgttgagccatcaaggtacagggagaaggtaatggcagtggctggttaatttcctaaagagcatgtctatgagtagaaaagataatttcacttcaaataatatcataaatgaagaaattttttttctgatattgctatctgagagcaatttgaagtcagcaggcagagagagagaaaatgagagagggagagagagagagagagaggagagaagagaagctgaaggtatcggaaagaaaggagatacttaatgcagtgtggtgtggagaagataacagtagatgaggccatcctgaaggtggcagtaaagatcacaaagtacccacattaagttttaagacaaacttgtaaaaccagaaggaagaaagtcagaacatttagatgtatgtataatttgatgtttaagagtttagggtctttccacattcaagtcttgatttttactgtgaaatagaataaaagcaatctcttgaagatgaggaggccaaaaattatctacttgagaagagtgataaaattttgaaatagccaggcagatgggaaatacatctgacaagggtggtattataggatttgtagaacaaaactaaaattaaatatcataaaattgaagtggcagaaacccacaaaattatacatttttttccaacagctttcagaagatgggcataggactgataaatgcagctggcaaaagtctaccacatttgggctttgtatagcaaggacatcagaagaacagcatcgtcagaagggagggtacagtgattatggtggaactgcattataaactccaggctttttggaaaaaccaagttcttagacaaaagaaaagctaatagacattaaaagagatagaagtcaagagagtattgattagagtaagggctgacgtgtaagcatggttggcagacccacccctaatatttaaggtgcccggggccagaatgttattagagctccttctattacttacctaaatatttgaaagtagtaaatcaagacaaattattaatgcaatgtgattgatgctactttgacaatttatccttataaaagcatgaaagagggaagttccacttcaatatgtggtggttcaggaagagccattccttagaccctgatgtccattcctctcatcccagcctcagctccatcccatgctgagggagatctgaccacacgtgtgtcacgcaggttcttgtgcccaacatcctttacaaccttctcaaatggcttgtgtctaaggacgtggataccacaaatgggtcctctgaggagaaaagagcttcataaaaaatctgtgcaggctacagaggcaggaacaaggccagttaagccaggaattccagcatcctgttattcagcgtataatctgagaaggaggtgcaaggtctccaagtgagcacttatacttggccccacaaactcttcacccctcagaaggggtgtagtataaaaagggaagactaaggccttgcaaagaagaccctcttttggggtccaaggggtaacattggtaggataaggattaagattattaatgattccaatgtggaataccagggttgaacattcaataggtaggacattcatgataacagaaagagatgtaagacatgtgtgcttaagagattgaatcattaaactctatatattttattgaatcattgaaatatacatatatttgaatcattggaaaaaggtatatatatatgtatatatatgtatatttatatcaggttacggcactaaagaaccttcatgaagctaggtctccagattaatctactgtcagatactcgagtcttcaaggtgagaacaagagtttgagtggagaggacctggtgaaatgggagcaaaagactttgacaggtgaggagaaatgtcgaggttcagtaaagggtgataatgggcaggaagggatgacacaaccaaagtacagaagaagtttgggttaaagctgacatagaatctttgcaagagactaggaaaaggaagctgtcactgctttagagtcctgtcatcatcagggcatgggcaaataagcattcattattctagggagaagagatgggtttcagtgagggaaaaaacccagaagcaaagaggatgagctcgaggagcagagaattgctaacacactttggtagaagccatgactacttccacatgtatacatatgtaactaacctgcacattgtgcacatataccctaaaacttaaagtataataataataaaataaaaaaaagacttggaaatgaaaagaataagataaaaaaaaggaagccatgactactctgtcactttcattaccagtccctgcacagcactggagcaatatgtatacataacaaacattggttaagtttatgaattatttgatattatttctatcagccagatcttctcaaggttgaacaaaatagccttaaaaaatcatagtttttccagtcatagccggctctagaaaattagttcataggaagattgcagagctctggaaaagagaaggtgagtagtagaggtctttttagttctctttcagaattttatgtctatcataataatttgggtaatgtaaatttcaatcacccagtatttaagaaaacggaagaagataaaatgtgctatatcctttatatattttgcaaataattattgtggagctggttttaactattgattttgtgattaataataataataactgcatttaggttatgaaataacacagagccctactaggattttcatagttgaatttttttaatccagaagaatatgacaacaaaataattactgaagtaactaaaaaaaattattattgacttatattctccctagccaaatatctataacaatgtttttctaaatgtaaatactaatataataatgaagtcataaaataaatcttgtgggtcataagctgatttttaaacttataacaatgtatcacagactttaaaatgatgtttaaagagaaattctagcattcatctacttatttatccacctgcatgtattgagtgcctgctctaaatgccaagtgctctgctgtaattggaagtagaatgctgaacctggtaagtaaggatactccttttacagagctgaaacctgcagcatgcaatactgagaggtgaaggcagctggacttcctgggtgagtggggacttggagaacttttctgtctagctaaaggtttgtaaacgcaccaatcagcaatctgtaaaaatgcatccatctgcgctctgtgtctagctaaaggtttgtaaacgctccaatcagcactctgtaaaaactgaccaatcagcgatctgtaaaacggaccagtcagtgctctgtaaaatggaccaatcagcaggacgtgggcagggccaaataagggaataaacgctggccacccgagcccacggaggcaacccacttgggtgctactccacgctgtggaagttttgttctttccctcttcgcaataagtcttgctgctgctcagtatttgggtctgcgctacctttatgagctgtagcactccccacgaaggtctgcagcttcactcctgaagccagcaacaccacgaacctaccgggaggaacaaacaactccagaggcaccaccattaagagctgttaacactcactgcgaaggtctccggcttcactcctgaagtcagtgagacctcgaacccacccgaaggaagaaactccagacagatctgaacatctgaaggaataaactccggacacaccatctttaagaactgtaacactcaccgcgaggggccgcagctgcgttcttgaagtcagcgagaccaagagcccactggaaggaaccaattccggacacagtatgataacccctagccacgtgtggctactgagctcttgaaatatggctactccaaattgagacttgctgaaagcataagatagtcaatttttcaatgatagtatgaaaaaagacaaagtattgaattgataattttatattgattacatgttggaataattatattttggatatattgggctaaatgacacattaactcatttcatctgtttcaatttaaaaaatactgctgctagaaaatttttaaggaaatgtgtggcttcatttgtggcttgcattatgtttctattgaacggatagcacaggctttgggtctaagggtaaaacagatagttaagcaaacaattgcgatatggtgtactaagtactatggaagggaaatataagctgtcaatgggagaaaaacattacctaatttaaaatagtaaagaaaagcttttcaagaggtggaatgtttaaatatatacttaaataatgggtaagaatgggccagaaaaaaaagctagggtagtatatactcaaaagtagaaaaacaagaatcaagaagcaaaacatctgcatttgataaactaaaagaaatataatggctcacacctgtaatctcaacattttgggaggccagggcgggtggatcacgaggtcaggaattcgaggccagcctggccaacatggtgaatccccgtctctactaaaaaaaatacaaaaactagccaggcatggtggcgggcacctgcaatcccagctacttgggaggctgaggcaggagaatcgcttgaaacagaaaggcagaggttgcagtgagtcaagatcacgccactgcactgcagcctgggcaacaagagcgaaactccatctcagaaaagaaaaaaaaaaaaattatacacacacacacacacacacacacacacacatatatatatatatatatatatatatatatatatatatatatatatataatgtagagaataatgaatgagagtggtagggaccagtgaggcaagaaagggttggagcatcaacgatttttagaagcactgtaagaagactggtttttatagtaagatcaatgaaaagtcactgaaggattctaatcaggttaagatattaccagatttccttctttgaaagatcattctggcagtaaaacagaaaatggattagaggaaaacaacactgatcttttcgaaggtactgagcatgaggatgaaaaacatgccttttgtctttgttattggttgaaggtggagggcaagggaggcagagggagcaggagcaaacctttagagaaagcgttttttgtggtttcttcaagaagtgggagagagagtaaacgggtttaggcttggctagttgaatgatttcagtgggctctgaatttcatggctgtctctatttgtctgttattaggccctggagtgatagggcagcagaatatctactctgaactaagagcataacaaaggaggtggaagaggcgccaggatagctcccatatttggagtgttatcattcaagtacacactggcaccagggtccctgaggcttgctcattgaggttgtcaacactgcaagaaggagtttttgtggcagaacagacattgattggagatgctggcaaggtagataagtaatgagtctggggctctgtagagatattcaggcaggggacaaaattatacatgagcttttaatgagtaaatagttttgagaacatatatatacacatatggtttatgtgtatatatataatttatatataattataattataaccatacaatattatatataattataatatttatgcataaatattatataattaataatacataatatattattatttatatattatgtattataattatatataaaagtatgtattataattatataaaattatatatttataattatataaaattatatatttataacattaaatacttatgtatatatcaataatatgtgatgaaatattaatatattgtgtattaatatattagtatataaataatatataatatattgttatcaatatattaatatataaataatatataatatattgttatcaatatattaatatataaataatatataatatattgttatcaatatattaatatataaataatatattgttatcaatatattaatatataaataatatattgttatcaatacattaatatatgctaataatataacaatatattatcaataatatataaaatataataattatatgtctgatgattgtatatatattgtatatgtatacatacaagccataactgttctcgactactcattgaaagctcatgcataactattttatatatacataaatataattatatatataattgtctaagaaatgtggaaaaaaatgaaagaaaataagtcttagcccaaatctcaagaataattttagaattttagatgttgtttcttgatactatcagagccaatgcttgttttttttttcgtattaaacatattgaaatgttttcctttactatataaaacttaaatacatggttaatataaccaacaaacctacataaggtaactttcaaatgtcccacctggcatacacttaagtaataaaactttaaacaattatctaattatagaatccaactgatttgtatatactgcacatatacattatgtttttttgcatagttttaagataaatggaattttccaggtagagaaacttgactgggtatcaccataccttctcatgcctgtcattccagcactttgggaggctgaggcaggaggattgcttgaggccaggaatccaagaccaatctgagcaacatactgagagcgtgtctctacagaaaacataatagtaaacaaaagttgtgtggcaacttgaggaaaattatttaattcaaaacttcaatatgtgtagttccatcagtttggaaaatcatcccaccagtggcaacactgttagtggcactgaatcgctaacacacagctctattggtctggttgataggtctgcgttcactgtgattctacatagaaggggaaaatctggcttccccattatttatttgctgtgtgtagacttttcctagcatttgcatgtgtgtgtgtgtgtgtgtgtgtgtgtgtgtgtgtatttttagacggagtctcagtctgtagcccaggctggagtgcagtggggcgatctcagctcactgcaacctgtgcctcccaggttcaagtgattctcctgcctcagcctcccaactagctggtactacaggcgtgtgccaccacgttgagctaattttttgtatttttagtagagacagagtttcaccgtgttggccaggatggtctcaatctcctgacctcatgatccacctgccttggcatgagccaccactcccgggtacctttgcatatcaaaagatacatttcattatagactatttctctttaattcatttcctttctgcagtactacccttgttttgcaggatgtctagtttcccccaacccactctctcagtgaatgctggtagtccgacactataattcttataatacgtaaatgtactcccaacaattttcaaaagcctctgcagggagatatccaactactaatttagagaatgtatagatcttttaaggagtatttttaaatgtagatttcattattactcaggcagggtgaagccaagagaccagaagatgatggtcattgaaaagagattttgttacagttcaagagaagcaagcacaacatgccatgccttcatcttctgctatgattgtaagcttcctgaggccctcaccagaagtggatgatggctttacccttcttgtacagtttgcagaatgtgaacaaaagaaacttcttttcttcataaattacccagtctcaggtattcctttagaacaaggcaaaacagattggcccggcgtggtgactcacgcctgtaatcccagcactttggaaggccaaggcgggaggatcacgaggtcaggagatcaggaccatcctggctaacacagtgaaaccccatctctactaaaaatacaaaaaattagctggatgtggtggcatgcgcctgtaatcccagcactggggaggcttaggagaatcacttgaacccgggaggcagaggttgcagtgagccaagatcgtgccaccgcactccagcctggacaacagagtaagattctgtctcaaaaacaaaacaaaacaaaaaaaacaatgcaaaacagactaacacagcattagaataaaaagacagcattagaataaaaagacattgttaatacaaagagacggcaaacagaaggccggaaatgtgggactaaaaccaggaggacttggtctcctggaagacaaaagaggagatcttttcaaggaatgagaaccaacactgttaggtgatttttagggtcaaatacgataaaggcttgagatggttaaactaaacataacaacgggcagataattttaacctgatatcagtatgagttgaattatgaagaggaaatctgatttctgaggtcagagaaaagaggaaatagaaacagtgggcatgtgctcttttaccctgagaattctacctatgccagcgagggaggaacttgttagccagaacaaactgccatgtccagaaaagatttttttaaaatttgttcattttatttttagttcagctagaaggcaaaaattaagcatgtgtaaaagcttacaggaaggaagacgtttgtggagagtggtaggttaaatatacagacaggaaataatcggttttcttcagaaaatgtggaaggcaagcaatgaagggcacacatttttttttaagtgagctttcttcagttccaggggaaaatgattttattctaacagaaaacaagaaaaaaacagatcagatgaaggttcataaaaatttgtaactttgagggcgggagactgagggagtggtcttctggcaggttttattttattccttttttcccctaagaattagataaactcaccagataagaataaggtaggtgaaaaaaggatcctaaatttaagaagaatttaggaagttagaaatagctgtgtggagactgagagagacagccaattagagaaataaatccccaaaagggtggagagcatctaaagaatgtagtaggtatatttaaaattttattacaagctttttctgcttcttaaaggataaaaaaaacaagtgtactgagaatatatcatttcaaatgaaacagcatataaaagattttcataataactgtaaaaaagatgatatagttttacaggattaggcatcagtaatgaagaagaatataggccaaatctgaaagtcatgtcctcaggatgaatcttaaacacttacaatgtatgtaactcattcacatcaaacccaagaagttagaaactgctttgaaacagcacgtcatataactagaattatggtttttcaattacaggggttgattcttatattcaattttagttgtcatggtggattgttctcatagcatatgtaaaaaggaaaagaaaatgaatatccacaccaaatttgtagcagttgaattacaataagtttgatgaattctgcacaatattaaccaaagaattgtgttatgtttgcaaaaggcttacacatttgcataaactgacaggaacaaagagactacctctttatgcatatccctattttcctttaccgatgttcacattgagcaagggaatgcaagcccagggctcgaaggaaggaagggcattatgataggtttttaaaataacaactgcctctttcagcagttatttttctttaaggagccaaaaactaaaatttaaaccttcattctgtcccaagcacaactgaggaacttgccatcacaaattgaaatcaacaatcatttagacacctgttcagtgctgtggagccacaaagatggcaaaccacaaagaagcaaattatgaaattctggagacagcaaagtatatagacattatccctgaagaatgcggggtttgggagttctgacctccatgcagtcaaagatccacgtataactttgacttcgcaaaaatttaactactaataacctactgttgaccagaagccttaatgataacataaacagttgattaacaaaatgttttgtatgtgttatatagtgtattattacaataaagtaagctagagaactgaacatgttattaagaaaatcataaggaagaggaagtatatttactatttattatgtggaaatggatcatcataaaaggtcttcatcctggtcatcttaacattgagtagagtaaggaggaggaagagaagaggctgatcttactggctcaggggtggcagaggtagaagaaaatccacatatacgctgaccttcagagttaaaacccatattgttcaagggtcaactgtataactgacaactacaaccataactaagaattataagttagtgattaaaaaggtgagcttcagaattaggtatagctagttggtgttacccactataaactgtgtgacaatgggtaagatacttattcatcctaaatctcaggtttgcttgtctgtaaaatgagcaggataacattcacttccataagatagggtaccagtaagtgaagtaagtattaaagtgcctcttatgatatccttcacatattagccattaacaaatagaaactgaagcaatacataagagtgttgaagacattaattcagtctaaatgcagtggggtgcagaaaggaagggtgtttcctttcccagatcccaatgctagctaaggctaagtacaaaatctgtatcatgggctaggcatggtgtggctcacgcctgtaataccagcactttgggaggccaaggcgggtggatcacgaggtcaggagatcgaaaccatcctggctaacacggtgaaaacccatctctactaaaaatacaaaaaattagccaggtgtggtggtgggcgcctgtagccccagacgcttgggaggctgaggcaagagaattgcttgaacccaggaggcagaggttgcagtgagtggagatcgcaccactgcactccagcctgggtgacagaacgagactccgtctcaaaaaaaaataaaataaatctgaattatgtccaatcaaaatacacacacacacacacacacacacacacacacacacacacacactccctctctctctctctctctctcttccaaaaactcagttttaaagttggtgtcggctttaccacattgaaaaataaattccctgatgcaggtcacctcccctgataaaggcttttttttcattttgggagctacatatgtacaatttttctatcagaaaatcccccaccttcaaacatctaaattacatcagctataatctgatctctcctaatttactttaacagcaacaaaaaccatatttctgtcatcagtgcttatatctctgccatgacaaataccagtagaaaaaaataatagtctcttggatttagcctcaaacttacaacacatctctttgggttcatgacctaatacaaaacttgtgaatataaatttactcacaaacacatctattacctcaacagtctatcccttccaaatgaacctgtacaagttaaaaacacaaaatggaaatatatacatatatatctatctatctatatatctatctatctatctctctctctctctctatatatatatatatatagaactccaactattccctttctgctgtgtactgacagtttgtgtctcatcaaaattcaaatgttgaagccctgattcccaacatgatggtattagagagtggggcctgtgggaaatacttaagtcatgagagtggaaccctattgatgggatcagttccccctaacaagagatgccagagagcttgtttccatgttctctgccctctgtcatatgaggatacaatcagaagattgctatctgcaaactaggaagagtgctctccttagacatttgatttgctggcaccttaatcttagccttttcagcctccagacctgtgagaaaccactgtttgtggtttaagccatccagtctagggcaacagagacctccttctatcctaactgagcaattagacttaataatcttgaaactcactcactacgtgactaatgtaccttgtctattcagtgtatttcccattagatttgttcatatcactgtcccctctttaagtattatgaacctaagaaaaaaatatttttgtatggaaatacaaactgtgtgatttatgaaattatattttgacattttccttattgtaatcatacaaaacagtatatacctaatgtgtgaaccggctgtaactgggtagttaagcaggtcacacataaaaaatagtaaaaatagctcctaaatccaaattttcagagagaagggagaccacataattgcattcaaatgaaagtttaaatggacattttagtgtgttgttcatgaattttggttacaaggagcaatgtagacacacattgattctttaaaagatggaaccatagaggataagaaagaaggccgtggaacacaatggtaacccactcatttcaaataggtgatggaaagatgaattattcatttaatagtgttagaagaattggaaagccatctggaagaaaatcattttgtgttttaatttgcaccaaaataattttagattgacaagttatctatattatatttgcaaaaaaaaggagaaatctttaaagtacaagaacaaagattgaggattatttattaaaatgtcagagtaggtagcacttcaaaaagcaaaattaaaagctgtaaaaaaaaagactacacttaaataattttatcacaaaggcaaaagaccaacaacaaatggggtaaaatatttttacctaatatatcaaaaagacttgtagtttatttaacacataaagaacaccttcatacaaataacgaaatcttaatatatatacacagacagttcatcaaaaataaaatgcaaatttttaaaaaaatacgtataatttcacatatgtgtttcaaataaaattgatttttacctcgtacattgcaaacatcagaaatagtttgataatttttgagcagttgtggagagtcggggcgtaggtatgtagatagggaaaatagaaatttctgtaagctgctgaagataatgtaaattggcttgaccactgtgagaagcaatttgacaatatttgcctgggaattcaatgcaatgttataccctcatctatattataatataatcttacaccctcatctatattttgaaaaatgacattctgttatttttgtagtatctctcatggctgttactagtggggatgagatgtcacagagactctttgcttacatttctgaccctatcatctacacctgctcagaaaacatttgaaaatccgctgtctttggagtcagaaaatatgtttaatttctagaacaagtaaataatactctcttcactttatttttttcatcttaaaatttagaacattacaatttttcacattactgctgtattaagataaaatatataaattggtatgtagtattcttcatatttacctaataattcattttttattcattcattcaccaaagcattttcaacatgaagatccagctaatgctcattatcattcgtcatgaaatagaataatctctacacttgaaataaaagaattcaatacaaaatcttaaatattacttctcaatttcataatgtatgactgtactagagttcctaaaggttggcattcaggatttcatgcaatgatagcaatgtagtagagtttttattataatccctgagacgttattggcattttgtaggcaggagccagaggtgctgattttcattcagtgtgtggggtcagaaccaaccaatgaagatttattccattgaacgtgctaatagtacacatgttgaaacatgcctatagacagaccatttcaactgaaaaatgtaaaagatatatattatccagagatgttaaggaatttgtccaggtcacctactgagtcaattgcgtactccaagatgagaatctgatgttcttgtccagctcatgaatgttcaaaaaaactgttttattaatcgttttcctccctccctccctccctctctccctccctccctcccttccttctttccttccttccttccttctttccttccttccttccttcctctttccttctttccttccctctttccctatctctctgctttcctgtctcatttttaactcctcaatttcttattttctttcatttttttcttccttcttctctcgaatttcaaatttatatcgtacaaaaacacaaaaacacttttctttcatttagcaaacataaaagatacctttcatttatttagaaagaaagaaatgaggagccagtcccggtagctcatgccagtaatcccagcactgtgggaagtcgaagcagacggatcacgaggtcaagagatggagaacatcctggccaacatagtgaaaccctgtctctactaaaaatacaaaaattagcagggcatggtggtgcgtgcctgtaatcccagctacttgggaggctgaggcaggagaatcacttgaacccaggaggcgcaggttgcagtgagccaagatcatgccattgcactccaacctggtgacagagctggactctgtcttgaaaaaaaaaaatatatatatatatagaaacaaaggaatgagttgcacacagtggctcatgcctgtaattccagcactttgggaggctgaggcgggtggatcacttgacgtcaggagttctagaccagcctggccaacatagtgaaaccccgtctctactaaaaatacaaaaattagccaggagtggtggcacatgcctgtagtcccagctactcaggaggccgaggcaggagaattgcttgaacctgggaggcggaggttgcagtgagctgagattgtactactacactctagcctggtccacagagcaagactccatctcaaaagaaaaaaaaaaaagaaatgaaaggtttctcttatgtttgctaaatgtaatttctgttactctcactacaattgactgccatacaaaccaattgtcttagtatcaaaagacagacaattggtttgtatggtagtcaactgcagtgatagtaacagaaatgaaagaaattgctctgagaggctgattgtagtcctgtacttcaccttttccaatcttctgcttcctcacaggtttatctctccatcctcctaaattcagttgcttattccccagaatacatgataggacatctgtggtggcttcttctgagatttatttagccagactttcattaaaatagcaactgaattgactcaataaaatgttgcttatcttaataaagctctttagagctttgcaaatttgcatttaatactctttagtgtcattatggcattaataatctgtgcccaaagagcaataaaaaaaaactttatactttgtatttaatagaggtagcttcataacccttcattttcacgcaacttgggcttttaaattaccagacagaaaaaggcagaatattcatatgcaaaatgtggtcaagtctcaacgataatactacttaggctgaatgaatctgaggcttctaggatatcagcctccttatattacccaattgaagaaaataatccatatccattttcgcaagcttgtaacatgcacatcaacatctctttaagaagaaattgctttagagtctcttgaaatattctcattgctcttaagaatgagataggaagagagcaaagagaagtagggatgaagctgtaagtaaatgagatgatatattggctgatgctttaagataagtctttcaaacccatatgcttaaataaattattaaatggaataagaaaatgttatgactgactttggcaccttgctcccatctctttacatctagtttctcctggcagattctattggcatttgtagcataagtgaaaatgaaagaaatattgagaaatatttcaaatctagatttcaaatagccacagtttggtgacaaaactctctctttgacccagctgtagccaggctcctctaagcacacttacagagtaggccttgaccttagccgcctatccttgtctgatatgcatagtccagtcttagcaaggttctccttagtttagaaagaatccctgacctctgataccggatgactctccatatctgatcaggtttctcatctgccatctttgttgtctatgtctttggcctgcccttcagcaagaatccaattaagttggtttagcaagaattcctctatctttgatgcctcctcttagcaactttccatccactgaccttctcactctcctctttagctataaatatccagctatctttactacagtcaaagttgacccccatttctttccccgatagcagtagtcttgaataaacccttctttactgttttaattactgtctgaataatttttggcttccccatttccagaagcaactgtgttaaggtaaatatgtagttatttagatgtactgagcagaccaatatggtggccaagaacgctgatgcaggatgtcttatatatgcacagtcttaaagttgttttacagtgtagccaaaaaacaattccaggaaatatttgttactttcctgggctgtagaatacagtatagtgggaaagtcctttacatcgcctagagtttaaagtccatttagatgaaaatcaaggtgtgtgtttagaaacaggagggaatgcttagaaagctccagaaatgacacaacccccagactctgcatttgttaagtgtgtcatgtatgttgcaacacaggttttccctggactgcacttgaaacagccaccatctcaggtttgctatgagatcaaggtggatttttccaaatgaaagatgtctaatgaaaatggagataaacccttgtagccacacttcttaacacctacagaataccatctccagcaaatcaaccagaagcatctgccagtaaaacaacagagacgtgagaaaaacaaaaaaagactcaaaaaacaaatttgaaggcaaatacctcaaatttggaccaggacaataaaagaacatgctttttacatgcaaaaaaaataaataaaaataaggccaatgtacatggagatgtgcacagcaagggtgtgagctgaaggaaaacaatcttgacattaagcaggagtgtgagtgaagaacacgtctatggactgactataaggcagcaaaggctgaaacaggttcaagttcccactgtgggagagctccctgacagaggaaaggcagtttctggtgttccacggaagaaggaagaaaacaaaaccctcgttgaagcaggatggcaggagccagtgacgaaaatcagaataacttgcagcaatattttttttctttttccttttttaaaatagccgctctaaagcaacttttctgacaagcagtgtacggaaaggcatagaagaggattaaatattttctagaccagtatcaattcagttagatacaagttgagaaaaatatgatgctttgacccacatggtaatgtttattttgcactattaatttttgcactattaaagcatttacttatattgtaatacttggcgacaaaactctctctttgacccagctgtagccaggctcctctaagcacacttacagagtaggccttgaccttagccgcccatccttgcctgatgtgcatagtccagtcttagcaagagttctccttagtttagaaagaatccctgacctctgataccggatgactctccatatctgatcaggtttctcatctcccatctttgttttctgtgtctttggcctgcccttcagcaagaatccaattaagttggtttagcaagaattcctctatctttgatgcctcctcttagcaactttccaaccaccgaccttctcactctcctctttagctataagtctccagctatctttgctacagtcaaagttgacccccatttctttccccgatagcagtagtcttgaataaacccttctttactgttttaattactgtctgaataaattttgtctttaacattgaccctatttatatttctagtgatgtgttgaaaaaggacctcaaaatgcctgcctggcaggatttcagaattgtcatttgcaaatgtgcaaatcccattttccgcattcttatttgttttttgttgttgtttgtttgttttgttttgagacagagtctcaccctgtcacccagcaggagtgcaatggcacaatttctgctcactgcaacctctgcctcctgggttcaagggattctcctgcctcagcttcaacagtagctgggattagaggcatgcgccaccacacccaactaattttttgtatctttagtagagacgggatttcaccatgttgaccaggctggtgttgaactcctgacctcgtgatccgaccactttagcctccaaagagccgagattacaggcgcgaaccaccgcgcctggccccattttcctcattcttaatgagactgtttattgcagttgtgatgactcttttctatatgtgtatactaggcatgtgagggtagaaggtggtgagggggatatggctagagagaaaatacaacctttttatttgttggctccacagaataaaataagttgtgtggagactaccataataccctagatttagaccctagtgctgtaactgaattgggtttttcttggggggtgaagggaggtgaatagaaaggaatttgcttttcacatgtaaaggagactacattgaacatttgagaccagaagactagacttttggtagtctacacagattgcattttgggtgtaaattccgaattcccattgctggggaataattgtacttttctccttgctggccccagttctggctgtatgtcttgttttgcctggggaatggtgagcaaaaatgatatgtaccacctctgccagatggtgaagagccagtatgtagcttgccatgactttccttcgctggctatagtgtatggaaggaggtatattgatggagctcagggcacactgctccaaattacagcaccttggcatttaagaaaacagcagaagcaggaaggttactttcacttttcttccctgaaggagggcataagcttaggaaagattttctgacattcccctaaagagtgccatgagacccttatgccaaagggctttccctataccgggaggaaaggaacatccttatctatgaagtcacaggatcaaagagaagaatctaaacaaacaggccacttcataaacctagcataaaaataagcaaatttaactttttcttctggtcttcatttccttagggaggcttccatgtcatacaaaacttatattaaataaatgtatatgcttgtatcctgtcaatcttgtcttttgctgaagaagtctcggccatgaaactagcatgaatgagaaaaatatatttttcttcccctagattatcaaagttagatgtctatcaataatatctctgaacaacaatgataagcagagggccttgctggacctagttaaacatgcttcacttgcaaagaataaaccttgtcttataaaccaattggatttgggggttgtttgtaatgcaacaaaatctcttacatcctatatgatccagaaagaaaatatagataattcaccatcaaatagaatgccttagaggtttgagaaaagataatcagagtataaaatgacagtaaatataaaataaatgtacatagcctactccttaatctttttgttcaatatccaaacctttcctcataatattggtgtgtggataaatttaaaaaagaataccattcaaaactgacagcttttcaggatcatgctatcctagcatcaggtcgtctggactttagagaccaaaatattaataatggaattctggatatcagataattctaatcagtgaattagtgatgaagacagtgaattaatcacgaaaaatattcaatcaatgtcattagagtttaggttgagaggtaaaaagtacttaaaagagaatgccagagttgaaatggagcaagttaattaataaataataatgatacatcaataaataggaatccccaatgccaatctttctcatggtaagaatggtcaagatccatgggtctataatatgtgtggccagaacatcatggagagttcttgctgaaggttgtgcaaaagattattgggccttatgtggaggtctcctattaataattttaggaaatgtcacaagtactggaagacaacatccaaatattcattacattgagcttaagaactctcactttttttttttttttttttttttttttgagatagagtctcactctgtctccaaggctggggtgcagtggcgcgatctcagctcagtgcaacctccgcctcccgggttcaagtgattcccctgcctcagcctcccaagtagctgggactacaggcgcacaccagcacacctggcacctggctaatttttggtattttagtagagatggggtttcaccatgttggccaggatggtctagatctcctgactttgtgatctgcccaccttggcctcccaaagtgctgggatttacaggcatgagccaccgcacctggccaagaactctcacttttacataacagaaagttttactctctgcatccaagggaggacagttatctgctcttgaggccgagagagtaaagaaaagaaagtaacatgagcaagtctaactcttcatgcaattgagcatagcaaaaataacatgtttgggtgcttaaaagccctgattttgaattcatgctccaaaactgtcaacaaatatgctgagctttacaaaaaaaaaaaaaaaaaagctattcaagatcccttctttgaaaatttagaaatgctttatgcttcttttgtaactagttaagacacgcttgcgtattattttgttatagtttctattttctgagattacatttaaaaaaatagtgtgaaggaagggtgtgcatccttgatagaacagtagatgtaaagatgcattcaattcctgagtagctatggaaaaaaacccaggcatgtacttgtcaaggcaagagttctaaagtattttgttttatttacccaatctcttaaaactaagaagtaattgtcttttaggaaatacttttattcttcaattaaataacaataatagctgtatggagacagaagcaacatttcgtcattgagattaagagttgcatatagggtatttagtttgtttccacacaattcaagtgaagtctgtgaatatgtcttggtgtaggcaaaatgatttttctgttgaaataaaggcttttcttctctgatgaacatagatttgtgcagagccaggtacctgcagattcccagttacataatgaaaatgtgagtgaaaggcaggctggtgttctggcttttgtttcattccctgaactaaatatatctctgaaattatcaacatctatttgtacttatataataaaaaataaaaattatgctcttctcaccttctcagaaactagagtgattgtaattcatagtacatataaatgcatagtactgtgtacacatgtaatatatataaaaagctgaaacgtacaaaagatcttcatctgtctcgcttatactcacctgaaattgagctaaaattaaggcaaaagattgatacaaatatctattcacaaaggcttgagtttttataaaagtttcaattccactcactgaaatagtttatctatatgtacactggccaaatcataaaatcttattccagaagcataatgagcaaaacctgaagatcaaaaatggatacagataattctcaaagaaagccagcagagaatattcattctcagtagtctccactgaggctagtgtgaacagaacaactgtggaattaacactaatacaaatggaatcagtctatttatagagactgataaaaacttcagcctaattaaatttaaaggagtttaattgagtaatgagcgattcacaaatcaggcagacccagaatcgcagcagtttacagagactccagcacagccatgtggtggaagatctatagacaaaagcggaaaatgacatacagaaatcagaagtgaagttcagaaacagctggattggttacacctggcgtttgccttatttgagcagtttggacactcagcagtgtatgagcggttgaagtacggccaccgggattggccaagactcagctatcgttacaggtgcatactcctaacttacattttcaattctgtctaccaattaagctaggtcgcagttcgtccacaaggactcaaatatggaagtacagagtccttctcgggccatatttagtttgctttaacaagactatttatagagcactatataacacgtccagcaatcaatagactgtttggttttatttctatagaatgttttattgcctgaattattccccccaccacaacctggaactcctatgctgaagtcttaattcccggtaacccagagtgtgcttgtatttggagatgggatctttaaagtggtaagtgagggaaaatgaagtcatatgtgtgtgggctaattcaaatgtgacccttgtccttttaggaacaagagattaggacgcagacaacacagacttaagaggtgatcatgtgaggatacagcaataagatgaccatctataagccaaagataggcctcagaatgaaatcaaccctgttgacacctgaatctccagaactgtgagaaataaattttcatggccgtgtgcggtggctcctgcctgtaatcccagcactttgggaggccaaggcgggtggattacttgaggtcaggagtttgagaccagcctggtcaacatggtgaaaccctgtctctactaaaactacaaaagtaaccaggcatggtggctcacgcctgtagttccagctctttgggtggcagaggcaggagaatcgcttgaacccaggaggcgaaggttgcagtgagccaagattgcaccattgcaccccagtctgggggacagagcaagactctgtcaaatgaaaggaaacgaaaggaaaggagaggaggggagaggagaggagaggggaggggaggggaggggaggggaggggaaaggaaagttgtttaaaccactggtctgaggtcctttgttatggagttgctaaccctctcacacaaaagggagtttcttatcttttctcaactttcacagtaaaatcttcatatccaccattcctgggaacacttgaataacaatgtttgaatgaggtgaagtatttgtattgattttggtatgttttttgtttatatctaatatatatggcattttagaaaacatttcttaaagttaagtatttcaataatgaagacatttcagtataacttgttgaatgttgtgacaagtcagaacgtcacttggttaacagctgtggtagattgcaaagtcaggcatagtcttgcatcccttcttgaattcactctgtgtttccttccactaagagatggaatctgtacttcacatttgcatctgggcaggtctgtgacttgccttgtcagaaaaagtacagcagagataagagtgtgtcggttcccaacataaactttcagaagccctctgcacttctctctttggcatgaaagttgtcctctccatgagcgaaaacctggatgatgagacatgtggcttagtcatcctctttacatgagccaaccaactgccaagtgccaccgacctgaattaagctatgttgactttccagttccctccccatccatgaactgaatgcagacaaaaatgagaaagcccagctaagattgcacaaacctcatctagctcagaagaaatatccagcaagcctgtggacttctgagcattaataaatgacttttggccaggcacggtggctcatgcctataatcctagcactttgggaggatgaggagggtagatcacctgaggttgggagtttgaaaccagcctgaccaacctggagaaacctcgtctctactaaaaatacaaaattagccatgtatggtggcacacgcctgtaattccagctacttgggaggctgaggcaggagaatcacttgaacttgggatgtggaggttgcagtgagccaagatcgcgccattgcactccagcctgggtgacaagagtgaaacttcgtctcaaaaaataaataaataaaaaataaatataataaataaagaaataaataaatgactgttatctagccactgagtcctagggtattttgttacatggtataggtagctattactggagccagttatgctttttatctggcatttcttttgctttgttacacttttgggtagatttttattgtcatctacttaagctcctttattttaatgtaatctaaaagtcattatatccacttatctaaagttatttctatagcatgacttagaatatgttactttaagtgtatactaatcccttgttaaagatgacagaaattccactccatcaacggaccttttctatgtaatcaattaatctcctttagctaaaagtacacataggcacacacatacacacatatcaaaaatagaagttaaattatttattatttagcaatatttagaaaatgaactactgaaatcaatgtttgaatgatgctgggttgggttatagatctttttctttttttttttttttgagacggagtcttgttctgtctgttgcccaggctggagtgcagtggcacaatcttggctcactgcaacctcctcctcccgggttcaagcaattctcctgcctcagcctcccgagcagctgggactataggtgcacgccaccatgcccagctaatttttgtatttttagtagagatggggtttcatcacattggacaggctggtctcgaactcctgaccttgtgatccagccgccacagcctcccaaagtgctgggattacaggcgtgagccacggtgcctggccgggttatagatctttatgggttatttttttcactactagtttaaaaccaagaatctctttaatcatgttactatgcactgtaattcctcccagagtttattatgcatacttgaagctcaaccaatgtttgcttcctggatgaattaatttgaaaggaaatgtgaaaagtactctgatttctcatttagttttatcctccacgtaaatcatcaggactatgaatgcagtttgaatttaatcatgaatcttccttgaatgtataaatacatgaaagctgatgacatgcccaagaaacaagcagataagaactatggacccttatttataaatgatctttctaatgtagaagatagtggaggtatcacccttcccaaagctcactactactttgggtttgcttgaaacacaaagcttatcaatggtcaactagtcaggtccccagtcaatatgatccagcctcccattaataagctatttggatccctaaggttgaggttggtgtgggttcctctgtcgtagatttgatatactttatttctgtagagctgtggaagtacaagcctggaaatttctaatactgtcttattactatctccatgcaacttaacatttagatttatccccccttagaacttttctgcactcatcctccagttcatcactacatgcacttccttagctgtgccctgacactgcctagtatttgaagctgtctccactgttacactcaatatgttcttttcaattattagtcactggctgtatttgctagggctgctctaagcacgtaccacagagttcgttgctttaaaaacagcaatttattgaagctagaactccaaaatcaaggtgttggcagggtttgtcccttctatggcctgcaatgggagggtcagccccaaactttgttccttcatttgtggatggtcatcttaacatttattttgcactaacaatctttgcactattaaaacatttacttatattgtactatttacttagtgacaaaggctccctctctttaaccaaacattagccatgctcctctctatgttatatattagccacatcttctctctatgtctctctgtggtcatcttctctctatgtctttacatcatctccctatgtgtggtttgatatctatattccccctttttataaggacaccagtcatgttagattagggtccacattaacgacctcactttaattcgattatctcggtgtctttacaagacactgtctccacataaggtcatactctgaggtattgagggttaggacttcaacatatgatttttaggagggtaaaattcagcccataacaccgattataattttaaattgatggtactgattacatgaacttgatttttttgtattattattactgagattgaaaaacaaaataaatgctaaatagaagcccaatataatctaaggattcaaagtgaaaaaatatcagatatgcttttctcccactctcctctactttgccattttggcatacaaaacagctctcttaattcggttttgtttggttttcatggttgaaatgctaagatcagagggttaagaaagttaaaatacaagaaggtatataagtagaatatctaagatcaaggaaataagcaatatatccttgaattgattgtgatgaatttttaagattagagttgtttaaatttacagaaaagttgcaaggatactgtggagagttttaccatacacctcacccagagtctcatattgttaaaatcttacatgaattattacagagcatttgtcatgactaaaaactcaacattagtacgataatatcaatgtagtctacacttactttggatttgaccattttactagttttcccttaatgactgttttctattccagggtactctcaggaaaacccatcatccttagatttcatatatttgtattttcttctggtctgtaaccatttctcagactttcttgacttttacagttttgaggttcctggtcagatattttgtagagcaatcctcaatgtgggttctttccatgtttctctcctgttcagactgctgttatgggtttgggggaccaatgccacagaggtgacgtgcccttcttgtcacatccaatcaggcgtgcttgctatcactatgacttatgactgatggtgttagtctttattacttggcaaaggtcgtgactgatttaaaagacttgctaatacctgcttgggaaacattttatctgaggaaataggcaaagttgttctaccaattatttaggtatttttaagccaactttggttttaaataacctattaggtcttcaggtttagctatttttaataccttaaaattattaagatttttatattatgtttgttcttacaataaaggttgtattgggggtaggagatcatgtgaataattcttcagcattaactattgaatattatgttgtttccatggataaagttttacatataaatgtctaatataaggtattagcaatgttagttgcatctatcttagtaatgttatgttttatttattttaatgaataaacttgctatataccattagtaggctttcatttcagagaggcagtagtgtataagaggtttaaatgtcagaatttaaatctaatgtacttaaatccaatccttactatctatgacttactaactatgagatcttgggcaggtccgttaatttatctgagtgtattagtcacggttctctatagaaacagaaccaatagtatataaaaatatagattgattgatagagatacgtaagagagaatttattacgggaattggctcacatgcatatggaggctgagaagtcccataagctgcttctgcaagctgaaaaaccggaaaagccggtggtgtaatttaagtccaaatctgaaggccttagaaccaggggagctgatgatgtaacatccagtacaaggccaaaggcctaaaaacccgggggctgctggtgtaaatcctagattgcagaggtccaagaaccagtggctccaatgcccaatggtgggaaatgtatgtcccattttcagaagagacagaatgaatttaaccttcctccacctttttgttctagtctgccttcaacagttggaagatgcccatccacactggggagggtggatttttttttttttttttttttttttgagatggagtctcactctgttgccaggctgaagtacagtggtgagatctcggctcacgcaacctccggctcataatatattatataatatataatatatcatatattatatgtaatatataatatatcatataatatatatcatatatgatatatattatatgatatattatatatcatatatgatatatattatatgatataatatatatcatataatgtatattatatttaatatatatacaagaatgatacatacaaaaattggcaggacatgatggtgtgcaactatagtctcagcaacttggaaagctgaagtgggaggatcctttgagcctgggaggcggaggttgcagtgagctgaaattgtgccactacactctagcctgggtgactgagtgaggccttttctcaaagtaaataaataaataagtaaataataagaaaacaagatggcaataaaagacaggcagaagggaaggtgtggtgtttactgcattcttaagcatatagatttttaaaataaattaggattagtcagacatctttaatcttgtgactgctttggttatccttttttttttttttcctttacactttggtagaaatagatttgacacaaagtaagttgtgaaagcatgtggccattgctttctcaggaaagttagataaaaataacctgaatactttataggaatagggtaataaatgcagctgcagtcttaaaatagtgcacattgcatttctgagctgtatgtattctacttcttaaatatgcctattagttattatgtaagttagaaaaacagtaagcaaaatgcggcattgaaaacagcataaattcaaaagagtgcaaactatggcaatctactataaatggtaaataggggaattaatcttgctagttggtcataagggtgctatttccagtgtgccctatagtgctggtccacttcattttgctctagcataaatctctttctcagtggaaataatagcatgccctctccaaatgtaaggagcaccgagtcaaaagataaagcaaaattagcatgatctggagattaatgtcaaaagaaggtaagaacatatatcaagcttgatttactctaaatgattgttcattttgattcagattagcacacatgaatatgtgttgtactgttgaaaagatcaatcatagaaagaattaagagacgtgcaatagaaaaattagaaatatgagaactggtttctattgtaaaatttgggcctacatcaacctgtgtcaaaatcaccatacaaaacctatagctttatatctaactccattagtaaatttttagttcatcatagagccaagaggtagaaatgccagtattgctatattaaaatctaatactgatattaaatattaaaatatattattaatatctaatattccttcccattaaaagttgaagaacattttaaactttttttatcagaaactgtgggtataagcaaattttcacatatcaggccattttagcatgattagatatgagtccatctgcctacacttgccaggtattctttttattttttctttttttactgagatggagtctccctctgtcacccaggctggagtgcagtggcatgatctctgctcactgcaacttccacctcctgggttcaagcaattctcctgcctcagcatcctgaatagctaggattacaggagtgcaccaccacgaccggctaatttttgtatttttagtagagatggggtctcgccatgttggccaggctggtctcgaactcctgacctcatgatccacccgtctcagcctcccaaagtgctcggattacaggcatgagccaccgtgcctggccgccaggtattctttttagctatcctttcaaaacttcagtcaacattctgtattattaatgcataatgcatgcttgttcctaatatcaattcatggctttgcaaatatgaattatctaccattaatatgtgaaccccaaatatctgagacaggagtcagttaacttagaaagtttattttgccagggttaaggatgcatgcccatgacagcctcaggagttcccgaagacatgtgcccaaggtggtcagagcacagcttggttttatacattttagggagacaggagacatcaatcaacatatgtaagatgaacattggttaggtccggaaaggtggagcaactggaagcaaaggtaggactacttaaagtgaggagagggcttccgggtcacaggtagataagagacaaatgcttgcattcttcagaatttctgattagcttctacaaaggaggcaaccagatatgcattttacttacttatttatttattttgagttggagtcttgctctgtcacccaggctggagtgcaatggcatgatctttggctaattgcaacctccaccttctgggttcaagcaattctcctgcctcagcctcccgagtagctgggattacaggcgcccaccaccacccccagctaatttttgtatttttagtagagatggggtttcaccttactggccaggctggcctcttggtcaggctggtctcgaactcctgacctcatgatccgcccaccttgccctcccaaagtgctgggattataggggtgagccatcatgcccagccaggtatgtatttttttcagtgagtagagaggtgacttagaatagaatgggaggcagattggccctaagcagttcccggcttgacttttctctttagcttagtgattttggggccccaagaattattttcctttcacagatataaaacccacaccataattctgtgtctaaaggtttaatagttataaaacattaccgcaaatgaggaaagaaggtgcagattctcatttctgccttcatttctctcttacgagagattctcaaaatttctgatgtatcacacgtgaaaatagattggagaacattctattttcttgttttggatgatgtaacaagtataaaaatgcaccattcacacctcctactagagggagcagaatgacagccccagctgtcgcttctccagaactaccacggcattcatgccaaggtcaggctttctgtgggcagcttccagttgatgactgcacagtggagatactaacgcagacccatttctgcaagacacagaactcctcaaatgggagacttgagcttgaggattcctttatgggcttgatcaaaactttcctgaaactgtgctgaggttcaagacactttctactctttccctctccttcagttttcagaaatgaaactcattctgattgttctgcttacccctggctccttcaacatgttgaacaagtatttcctccaataaatcacttgcatatctaatttcattttggattctgcttctagaggaaaccaaactaacatatcattttcaatgtatcagtcttcatcactgatgtattcaaaatgtatatattagggaatcatacctttaccttagcataactctgtgagtcaaggaaaatcaagcattgcatttaatttattcaactattcaaacactcaataattatcgaggccttgctatgtgttagacgtagatagtcaacgtagatagtctctcacatagtaccttcataattcatatggtcacagagttgtaattactggcatgataggaattttcaactctacttttatgagaatcaaataaaatctcagagatctttttaaatttactttttttgttgtttatattttcatgcgtagttcatttaggtaaaacaacagtttgggcgggcttcaaacagttgcttcaactagactatgctctattcagctctcatttacttggactagctcacctagcagcacagtcttgtttagccagttcttctgttccagctgagaggtctccccagtagaaccataactcttccatcatagctgggttcctcaggctcagcactaaggatatttgcactagatgactctttgttggtgaatttcctctgtattttatagcatccttggcctctacccgctagatgacagtagcaacactccagttgtgacaatcagaaagctttcaagaaattgccaaatattcccgggggagtaaacttgcactcctgtgagtatcaatctttgtaagaattccttgaacaggctgggcgcggtggctcacgcctgtaatcccacaactttgggaggccgaggcgggcggatcacgaggtcaggagatggagaccatcctggctaacatggtgaaaccccgtctctactaaaaatgcaaaaaattaaccaggcatggtggcgggcgcctgtagtcccagctactcggcaggttgaggcaggagaatggcgtgaacccgggaggtggagcaattccatgaagaacaataaaggtttagttgagaatgactggccacaatataaaataattatttgttaagtagttaaatgtagtatgaaaatgtatgtgtgagtatgcgtgtgccacctctgtcttaatgtatgtgctttctctgagtccgctctgcctgttatttgatccttagttctatgtcgtgctcttagttctgatagatttttgatttagatttttgaatggaaacattaattcctactggtctaatcttttttttgtatcaggatgaaaagtctatcaatagataattctgcatttctgtcttcatttcctcaaggttcagaactttaaatacacatttttaatcaattacttttatttccatttttaattaactattaaattaatgaatacttactgagtttcgtcaaggttcagaactttaaatacatatttttaataaattacttttatttccatttttatttaactatttattaaattaatgaatacttactgaatttctcttatgtgccactctgtatcaggtacttgggacacataggtgaatgaaaggaaacaaaatatcttgtccttatcaagtttgcattccagtgtacctgagaaagtgtatgcagatgttcactctcctcaatgtatgccaacgggaaacacattgaaattccaagcaatggcttcttattttgcactgatcgggttggtggtggtggtggtgggggcaggtgggtgatgaaggctgggttatggataaaaaaggtctttaaaaaaagggtttagtgaccatatttactagagatgcacacgaatgcacacaaacttttgatacggaagtgctgggaagggaagagcgtggtccctttaaatgatatggaagggggaagggaagtgctgggtagaggcggtcatggtccccggctagggctctatcccagggacctcggtcttcgcgcccaaaagtggcattttccaagactaccttggcccaccacgcccctatcctgggcttataaaaacccaagaccctagcaaggcagagacatgagctgctggacagccagaggaatacattggtggaagaagacaaacagctggacattgagaagactttgaggggagcatgcctgcggaagagcacaccgccagatgcccggacaccagcaggccactgaccaacaggccatgaccagcggaacgatgtggagtttggccagggcagatggaggagagcccggggccaccaagcagcccaattccacgggaaaaccatctgtcttctggctcccccatctgctgagagctacttccactcaataaaaccttgcactcattctccgattccaggtgtgatccaattcttctggtacaccaaggcaagaaccccaggatacaggaagtcctctgtccttgcaacaaggcagagggtctaattgagctggttaacacaagccgcctatagatggcaaaattaaaagagcaaaacaaaaagagcaccctgtaacacacgcccactggggcttcaggagctgtaaacattcacccctagacactgccgtggggtcggagcccgacagcctgcccgtctgtatgctcccctagaggtctgagcagcggggcgctgaagaagcgagccacacccccattgcacaccctacaagggggacaagggaacctttccagtttcactttcacattgagtactatttcaaaaggccttgaaaactcaatactgattttctgttttgccttaattaactgtatctcagcctcccacagccactagcttttctgtgtaactatttcttacattattacgcatcaggccagtacataatagcaaaaactgtgatgcacctggagaaagaaaaggaaaaacagacataggttgaagccctccgggataggacacttgccgcttatttgctgagtatctactttataatcatgatacttaaagtcacgccttctgaaaagaggaagcagatgtggctgcaagaatttatgtaaactactttctaagaggctatggatacatacattgtgatgtttccatctcccatttaatccttgggaaatcacatcatttacagatatttatggctcttttcagctttaacattcaataatttaactaaaattagaagttaacaaaagtcactgagactagaatttcttaattttatttctttatgtatgaatatttactaatatgtaaattttcttgtaagttctgaatcctaccttctttttaaggcacacagatttgtcctttgtagaagaactgcgcacaaaataaggttatcacagaaacatataagccaatagtaattatgatataaaatgctatattataaagggcttggcatgatttaatttcttatttttgtatttttcaaagagtaatataaagcatttctctaagcaacagagcatacatgcattttacaactttgtttccttttatcaaatgaaaatggattcaatatcagatttgtggcataaaatctgataaatctatgaagtctcaatgaactaaaacggcaaatcatattattttacttcattcctaaagaaaaaagactcctctatctttctcagtcttacattttatacacacacacagtcacacatacacacacatatcaaagctttattaaaaataaaacaaaatgccccctcaacttgccatgtgcaataaacaaagtttatgtcctctcaaaattcttatgttgaaatcctaatccccatagtgatggcatttgagagtggggcttttgagaggtgatcaaggctcttcttgaatggaattaatgcccctatgaaagagacctcagaaaaatcccttgtcttttccagtttgtgaagatacagagagaaaacgtctgtctatgtggaaggaggtcctctccagcgcatcatctgccagctccttgacttaggaccctccagcctctagaactgagaaataaatatctgttgtgtattaccagtctacagcatttttgttatagtagcccaaatagactgagacaccagaggttagtgcacatataacttcagtccatcctttccatgaatatatggtgtttatggtaaaaatcaatatgaagccatggttggtcactcaataaagaaaataaaagtaactgtcttttgtaaaatatgcttgctagttacaggtttggacttaaatgttctaccatcttttcaacttgatttaaaagaaaacattaacagaaagttaaccagaaaatttaattaatatcccgatttctaagtatctccatttcacaccattctcaccactctagaaagtagccacctagaaagtagtttacgtaccttttgcagccacaaccgctgcctcttttcagaagtcaagactttacatatcacaattctaaattagatgctcagcaaagaagctgcacgggtgctatcctggagtttcaacctatgtctgcttctttttctttctccagatgcatggaggtttctgctattatgtactggcccaatgtgtaataatgtaagaaatagttgaacagaaagctagaggctatgggaggcaaagatgaaattaatcaaggcaaatgggaaaatcagtattgagttgaaaagacttttcataagaaagaaaacattaacagaaagttaaccagaaaatttgattaatatcacagttcctaaatttctccacttcatgccattcttttatctatttcaattgtatgtcatcttaccatacaattgaaatatataaaagtctttacacctaaatattaatagtaaaacactgcaatttaaaaggaaaatggaaaaagagaaaataatttgttcggaagaacattaactctcagaaataagaggccacaactataaaaacaattccagtccaattaccagttacaatgttattaaaagtgtggtcccttgatctgagtgttgagatgaagttacacgtcttaaagttcaaataaaaataattttgaaaagtaacatttaaaaggccctggtaaagcattataaaatactctatgagttttcaacatttctacacaatcatgagtatatttaatgttatatttccatgatctcttaaaaaatattttcaaaacatggtgtgagacctcaaagggacaattttgtgaaagttacattccaaaccatagttctgcagaaatgtgtactgttacactgctaccaagtggcactttggtactaaaaagaaagatttacctgaacaatgatcagtagtggttcagcacattgctttcaatcagcaatatttcttgaatgactctcacaggacagaccatgatgcacggccactctcatacattattttctgaaggtagagaatagttattcctccaagaaaaacatgccaaaggcgagcatgtaactgtaacaaacccagaggaaaaacaatttacagtgactctagtttggtggaaatggtcagatggaacctgattagaatatgaaataaataattgagtatgattttgtagtctactaaaatacaataaaggaactaaaatgagtgtgatagttaatagtgagtgttaacttgattggattgtaggatacaaagtattattcctgggtgtgtctgtgtgggtgttgctgaaagagattaacatttgagtcagtgcgctggggaaggcggatccacccttaatctagtgagcacaatctaatcagcttccagcaaacatgaagtaggcagaaaaacatgaaaaagagaggcaggcctagcctcccagcctacatctttctactgttctggatgcttcctgatctcgaacaacagactccaagttcttcagttttgggacccggactggctctccttcctcctcagcttgcagacagcctgttgtgggaccttgtgatcatgtaagttaacacttaataaactcatatataaatatatatatatatatatatatatatatatatatatatatatatatatatatgcaccactgcgcccagctaatttttgtattttttgtagagatggggtttcaccatgttggccaggatggtctcaacctcttgacctcatgatccacccgcctcagcctcccaaagtactgagattacaggcgagagctaccatgcttggacaagactgaccttttttaattagctaattcccatgaaaattatccaagttgttgcgcatatcaatagttcattcctttttatcactaagtactattccataagttacttttttttaaagtttattttatttttttcttttttatttataaaataaataaaaaatataaaaataaaatatgaaataatatatatatataatataaaaaaaaatagaatcttttcttatactccgcctcctgggttcaagtgattctcctgcctcagcctcccaagtagctgggattacaggcatccgccaccacacctggctaattttttgtatttttagtagtgatggggtttcaccatgtatgtatgggagtttatatatatcctattagttctgtccctttaagagaaccctgactaatacaatgagtatgctgccagcatgagctagtgtaattaaataaataagattaatgtgacacaagaagcctttaaaactattttatcaaacacgtgacatatttatattttctactgcaggaagcaaatgaaataacacttgtttaccaagaaattgttacaggatatatgtatcattcaggaagtagatgttcaaaaaaattaatgttcttcttgaatactaataaattcaagatttttagaaatgtacattcaggtttgtgaggaatatgacaatctccaaagttatgattgaaattctctgataccagaagcttctcccattcaaatgatatttcacatacagcacatagcctagggcaaggcctgggaagtgaattcttctcagcaactcttgctagttgtttgcttgatgtctccaaataacatatgtaagtagttttctttttattttaatcttcatacctacaaaaatatattttcttggtcaggcgaggtggctcacgcctgtaatcccagcactttgggaggctgaggtgggcagatcacagggtcaggagatacagaccatcctggctaacatggtgaaaccccgactctactaaaaaaatataaaaaattagccaggggtggtggcacacaactgtagtcccagctacttgggaggctaaggtgggagaatcgcttgaacccgggaggggaggttgcagtgagccgagatcacgccactgcactccagcctgggcaatagcacaagactccatctcaaaacatatatatatatatttttttttctctatcaatttcgtcattcttattaatgccatttcaaaatttagctgccatctatataatccccagagatgtatattgaaataaaaaataattgtgaaaatgacttcagcaacttcatagctgataccactttttgaaaagtagaatatcattaagacaggctatatattggcttaacagctaccaacatgtatcctttagaaacacagcttagtttcaagcccatttatgtagcagggagaaaattattattattattattattattattattattattattattattattttgagatggagtctctctctgtcacccaggctggagtgcggtggcactatctcggctcactgcaagctctgcctcccgggttcacaccattctcctgcctcagcctcccaagtagctgggactacaggcgcccaccaccacgcccggctaattttttgtatttttagtggagacggagtttcaccgtgttagccaggatggtctcgatctcctgacctcgtgatctgcctgccttggcctctcaaagtgctgggattacaggcgtgagccatcgcgcctggacgggagaaattatttttaagttatcagcatgtatttttgttgttagaggcagattttttgtctttatattttgtagctgttaaaatataaaatgtaaacacaaataaaacattggttgtttgcacctttggggtgaaagttgaagttcatctctagacagacccctttttcatttaagggatggatcactttggtgagctgatatggtaagcagacactataattctcagggaagctttaactggtggctgagaaagctatgtcttctatcgtgattatctaatgtgcccctaagcaacacaaaacacagaataacaatgccctctgaaggaagtggtgtttctaaaaatcagtcattcagggtcaaaccaagacagtgggctttactctgggttaagggagaactcatttctctttccgaatccaagggatggagcctgtactccagagagggccaaaacagttgaactggactcctgaagagtgaaagctgacccttggagaatagggggcggctggagggagtggagggaataatgaagcaaagacagtaaggaatcctgatgaaggaggaacagagattcctcggaatcaattgctttgcatgtttttatttatttttattataattttattctaatattaccattttttcagtagattatttttgtttaattttgctttttatactacagtcctatcttggctttgctttgggaagtggagcgtgtgtgtgtatgtgtgtgtttgttgtgtgcactcaggtgcatgagtattaagagaggaggattcaggtatgacttttcttgtgatacaatgatatatgcacagggacgctgactgaggacatggtttcaaaagagtacaagtgaatatcagagtagaagtgtcaagcaagagatgacaagcaactacttagggtgaatttcttaaacatatactcattcctgggattccatatgattaccacagacaggaccttatagaagtcagggccatacagctatcacacagggacatcacccaagctgtgttctaaattacctggtttataaggacagtggtggcttctgaacatcttttaagaagacgtcaaaattaggcagaagaaactgaaacccaaaaagccatttgttccccaagccctccttccacttgccaatatttcccagaaaataagcaacctagaaaaccctgttcttgctggaatctttctgttacaacaattataaagtccactttttctatagatcagcctgtcttattctatcactaatacaataatcagaaattgcatcttcacatggattgagatcaaaatgggaggaaacagttttgaaaaaacaaacaaacaataaacctgaagaagcttgagaccatatttcaactgcagcatcggtttttgttctgctttgccttgtgatatttttcttgagtgtgaggaagaattagaatcaataaataaaactgttgacctggactcacatcaaaaaggctgccaggtcagcgaacatcatcagctaaagataaaagaacttctttactttggataggacatttataactgctttgtcacctgtatgttttaatcctgtttgtggttgttgttgttgttaattccctactgtgttacatgttttaggcaggcaatttagtttaaattgctcatcctgtttgttttgttattttgtgggctatgtatggattttagtcattggcaaggaactctgatgtaaataagggaacaatagaaacctagaataaattgactgacatgaaatcatccgccaaggtcacaatgtcttatatatcacaaaaacaataaatcgatatgagtctgggcaggcaagttatatgtttctatttggagtcaaggtgtattgaatcatcccaaagaggaaattatctttaatctctgtgggttaaaaaatataaaacacactcaggaattcaaactaagtgaaaatgcattttggaggaactacgtacatttcttcaaatcattaataatattttaatactgtgctaataagttttaataattttggtaattaggatgattatcctgaaaaatactgcatatacccttattagattgcatcttgaatattgctttatgaataatctgtttattctcaatgcttgaaaaaattaaacaatgctttaaacaaaaattaaaggttttatttttaattaaaaaaatattgatttacaagatattcccaaaatcatgcagaaagatcttgtgtagctttcattcagtttctcccagtggatacccaactatagtccaatgtttaagttaggaaattggccttgatatcagtgtttgtagcatatgatgccgctttatcacatgtatagttttgtgtaatgaccatatcaatcaaggtacactactactccatcacaacaaagctcgctcttacatgctttctctttatactcacactcatttccctcccttcgcttcacccctgtggtggttaattttgtgtgtcaatttcactgggctttaggttgtgcaagcatctggtgaaacatcatttctagttgtgtctgtggaggggtttctggatgaaattaacatttgagtcagtaaattgataaaaacagatttccacccccaatgtggatggaccacattcaatccactgggcattaacagcctgagtaagaaagaattctttctccgcacgactgtctttaaactgaatgccagctttctcctgtctttggattcagattcagattcagactggaactataccctaagctccactgggctttcaacttaccaactgcagatcttggacttctcagcctccataattatgtgagccaattccttaaagtaaacctcttatctagctagatctagaacccattggttttgtttctctggagaacctcaacagacataatttctgatccttaacaatcactaatctttttttccatttatatagtttttttttttcttttgagacggagtcttcctctgccccaggagtacagtggcacgatctcggctcactgcaacctccacttcctgagttcaagtgattctcctgactcagcctcctgagaagctgggactagagacgcgcgacaccatgcccagctaatttttgtatttttagtagagatggggtttcaccatgttggccaggatggtttcgatctcttgaccttgtgatccacccaccttggcctcccaaagtactgggattacaggtgtgagacaccatgcctggccaagacggaccttttttaaattagctaatgcccataaaaattacctaagttgcagtgcatatcaatagttcattcctttttatcactaagtactattccacaagttatcttttttcaaagtttaatttctttctcttttatttataaaataaatagaatcttttcttagactaaaacaaaacatcccaaattagcacattatacacacacacatgcacactcacacatacatacataaagttcatgcacacacaatagcatacagatccacctgcccttatacattattttggactgatttaatttatttttgcattcctaagtgcttatattttaattatttcagatagtgccctttttaaaactgagatttcattgattccttcaatggccatatatcttattaaacaattataactctcttcaagatctgccctcaaaattccctaatgaccttctgaccaatcatcaaccaataatgaataggggatatgctgggcctagtgaggaagaatagggattatcccctggaggaacttgaggatgtggtatctatctatctatctatctatctatctatctatctatctatctgtctgtctatctatttaactatctatctagatacacatatgagatagaagagtatttttggactgaattctgtggtactagataagtatattgtaacataaagttgaattaaaaatagtttatcaatatgggaacatactcctttgacaaaagttttaacatattagtaaacatcctgggtaaaagtactcatgggctcctagaataccccttgaaaacttggaaaattaatgttgcacactagttgaagcagaataccatgagtgtcgtggcagtgaagataaattcaaaacttcagaggagaaagttcagaaacttgttgactgtgtatcagagtaagactcagaggaagttctgcttaccaaagcagtaaaagattatcggtatggagggaaccgagattattgggaagttcaaaagtgctttctatagaactgacagtagaaaatgttattacataactgggctccctcatggcaatgtggataataagatctctaaataatagaaactgaataatggtgaataccagcagaaattaggtgagtgcagatatgtggatgacaagaataaggtagcattcaggagattcccattcatacgcaactgtggagatgtctaatacaagacagtgttcctcaaagcaagatacatgggcagccaataaaacaatataaaaaagataccgagattgggtagtggagaaaactgaataaataataaccccccaaagagaagagagaggtaaagcaagacacaattacagaagaaagaaggtgaggtgacccatgcagagagctttgaaaatggaggcaggttaatgagcttcagaatgcaaggagtagaattctagaagctcgaaaaggcaaggaaagagagtctctcctagggcctcctgggtaagctggtccggcacataccttggcttcaacgtaattaagctaacttcagacttctggcttccagaactctcagaaaagaaatatgtcttgttttaagttactgagcttatggtaattggttcaggcagccgtagcaatctagtactaatactcagaaagctcaagggagtcagaaaataaagtcacaggtttttgcccagtttgtagacttatcccacttttcaatgcagaacacaggggctaaaggcaaagctgggtctctatgaggaaggaacttgcaatccacaaggctagaatgttctatagcaattcccctaatttctcaggggtatccatgaaccattacttgctcaaacataaattgggaaaggaaaacacccagatctttagaggatttggggacaaactgacattcacatcaagagatacaaaatactaccatgtcccctttcctatactgagtactaatgagcatgaggttcagagcatagtgggtcccttttatctacaaaactacctagtattcagggccttgttctctgaattataacagaaatggattaaggtgatatataaaaggttactcatatcaggctcttgagctgtaagggaatagttatgtattcgtccattctcgcattgctataaagaactacccgagactggatcatttataaagaaaataagcttaattggctcacagttctgcaggctgtataggaagcatggtgaggaggcctcagaaaacttacaatcatagcagaaggcaaagaggaagaagtcacatgttacattgccagagcaggaggaagagtgaggaagaggaggggctatacatttttaaacagccagatctcctgagaactcacgctcacaagaacagcaagggaggaaatctacccccatgatccagtcacctcctatcaggccccttctccaacaccagggattacaattcaacatgagatttgggcagggacacaaatccaaaccatataattccaccatggcccctccaaaatctcctatccttctcacatttcaaaatacaatcatgccttccaaacaatcctcaaaagtcttaactcatcccagcatttactcacatgtccacagttcaaagtctcatctgagttaagacaaatcccttctgcctataagcctgtaaaatcaaaaacaggttagttaacttccaagatacaatggaggtacaggcatttgttataaacacttacattccgagagggagaaattggtcaaaaccaagaagctacaggccctatgaaagtccagaacccagcagggcagccattaagtcttaagactccaaaataatctcatttgactccatgtctcacatctaggccacactgatgcaaggagacggctcctaagagcagctccagccatgtggctctgtaggatacagcctctgaagctgccctcatgggctggcattgagtgcctgcagcttttccagttgcacgatgcaagctgttggcagatctaccattctgggatctggaggatggtggctaccttctcacagcttcactaggtgaagccccagtgggaactctttgtgggggctccaaccccacatttcctctccacactgcccaagcataggttctccatgagggctctatccttacagcagactgctgcctagacatctaggtatttccatacatcttctgaaatcaagtgagaggcttccaaggctcaactctcacactctgcacacccacaggcttcataccatgtggaagcccccaaaggcttatggcttgcaccctctgaagcaaaagcctgagctgtaccttaggcccttttagccatggctggagcgatgaaggctgtgatggatgcagagcatgtcccaaggctgcacagaggagtagggccctgggcctgggtcacaaaaccattcttccctcctaggcctccaggcctgtgataagagaggctgctgcagttcagagacatttgtctctgaaatgccttctagcaattttccctattgtattggctattaacattcggctcctttttatttaggcaaatttctgcagctggcttgaattccttcccacaaaatgggtttgtttttttctactgcatggtcaggctgcaaattttccaaacttttatgctgtgcttcccttttaaatacaagttccagtttcaggtcattttgctcatgcataagaaaagtgacctttgctacagtttccaacacgttcctcatctccaagccctcctcaaccaggacttcattgtccatatcactagcagcattttcatcacaacaatttaacaagcctctaggaagttccaagttttccctcatctccctgtcttcttctgatccctccaaactcttccaacctctgcccattaaccaggtccaaagctgcttccgcattttcaggtacctttaatacaatgtcccactcctagtaccaattttcttcattagtccaatttcacattgctataagtaactacctgagactggatattttataaggaaaagaggtttaattggctcaccgttcacaggccatataggaagcatggctgaggaggcctcaggaaactcatggcagaaggcaaagcagcaggagtcacattttacatggctggagtaggaggaggacagagaaggtggaggtgctacacactttcaaataaccagatctcacacgaactcactcatgatgacaagaacagcaaggaagaaaactgcccccatgatcaaatcacctcccaccaagcccctcctccaacacaggattacaatttgacatgagattttggcagggacacaaatgcaaagcatatcaagctataatagtgggaaggccaagtggaagtttctgaaacttcacacaaccccagagagtaaataaaaaacatttctcccaggaaaatggtggagattaatggcaccactgaagtcttcgacaattagggttgtgatctccatcagattttgatttaattcaccagtctgacactactaaaagtaggtggaacacagcggttaacagtggactactataaataatcaagtagtagcctccatgaaactgctatgtcagacgtggcagggcagaagagagcatggtttctagcatctgcaataagtttcatgatcttatgaatggatacatttttatcactatcagaagagagcatcagaaattgttctcagcaaggtgaaattgacaagaggataaatttattatattgttccatgtctacattctcactctttgttataatttagtcctgttataatttagactgaatagtccagagagcattacaataggtcactatattgatgacacgatgttaattaaaccagataagccagaggtaacaaaatgttggagaacttagtaagaaacattggctctagagtgtatggatgatggactagcacttaaggtggcccttgggatccttacctgatggtatttttgcttctttgtaatcacttccccttgagcctgagcaggtctgagatttgctactaataaataggacatggcaaaggtgacaggttgtcagtgattacacgtacaagactatgttacatacaatttttggaactcacttgctaaagacttttttctttctcttgctgactttgaagaagaaatttgtcaggttgttagctttttgtggagtttcagatgcaggaactgaaggaagcatctggtaaacagccagagagacaccagagctcttggtatcacaaccttcaaaaccttgaactttctcaacaaccacatgagctcagaagaggaccccaaggccttagatgagactacatttccagccaacagaccaattatagtctcaatagagcagacatctatgtcatggccagacacctaactcccagtaaaataataaatgcatgttttaagctgttaaatttgtgcaaatactgtcactaagtgacagattgttaatacagcagaagatgaacactcaaaagatctagtgacccaacatattggtgaggttttaaaagatctagtgatcttgggaagagggagagattgacaaacatttttatatgagccagatagcaaatattttagcctttgcaatacgtaagttccctattaaaactactcaattcagctgttgcaatgccaaacaaatagaaaatacacaagcaaatgagtgtgctgggcatgatgtcctacctaaaatagggaataaatgtgtaggtttctcatttcccaatgacaaaaagtcagctatataatatggtctatatagtatagtcttggatctatattactttgtataactcttcaagttctgaaggcatcaatgttctacagttgttaataatgttaaaaaaccatttaccacatagcatgagaaatcctggcccccaactttgtgtgaggcctagagtaggaaagtccagtccaggttgcagtacaagtagccctgcctcttgacctaaactttatattactagaatgttctgtggtttgaaaggtggtaagtggaatttatgaggtagccttaaatcaaaatgtagtcccttagggttcaaggccatgtcatctgcatcagaaaagtatacaacatttgaaaaccagctcctagaatgtgggcccacgttcagacggagcacctaacaatggatcattaaaatactctgcagtggagaataccataggagctagttctgttagatccacaaaggcatagatcaaatgggtaagatacaattcaggatttggtagaagtgttatatctggtgtcagacatgagcagaaccatggggcctaggtatcatttgtagcaggaaccccacatgtcaccatcgctgcttcactagtgcctctaccactgctcatttccatggctttataggagatgctttatgaccagatgatggaggatgtaaaaaacctagcttggcacaaagatgagtcaataagtgtgtgtaatccataaataagtgtgcgtaatccataagctcaataagtgtgtgtaatccataaatggatgtggttgtactacagctctcacttgggagaacttgggagactgctgtgggattatggcttcccaaggtgctgtgatgagcagtgcatttggtcatcaaatatagaggaaaagacaacaggcacatggtaaatatataaatacactgactggtaataaatagtgccctgaccagttggccatagaccttaaaggagaattaaagattagaaaaatccaggaaaataaagtaagaggaggagtcatattagatggaattgtgaaaatattcatgaagtgtgaatatctttttagctcatttttttatagacacctgaaatgattaaccagaagaaagcaataaaaaattagtcaggatgtcaggacaacttatttatttgacatcagccaacttctatcatctgccaccacatgtgccataatgggtgagtgaatgaaataattattatgtcatagatgaagacataataacctgtgcttactcaccaagactaatctagttgttgataccactgaatgttcaaccagctatccacagagaccaacccttagtccctaaaatgaatgttcgtctttgagacaaactatctactcactagccagttgattacactaaaccccttcaacactggaaatgatcatttactatttttactggaaacaacttgtattctagatacaggtttttctttcctacctgtagcaacttgcttagttctactaactgaggaattacagagagttttgctcaacaacccaggattccacataacatcgtataagattaagggatccattcaacagcaaggagaagggagagggagttttaggtaggtaggtaatcatggagtacttgatccagtcatatttcatatcacaatgtatccacttgtctgttggaacactgaaatgccccccacttttttttttttttttttttttgagatggagtttcactcttgttgcccaggctggaatgcaatggtgcaatcttggctcattgcaacctctgcctcctgggctcaagcaattcccctgcctcagcctcctgagtagcttggattataggcatgcaccaccatgccttgttaattttgtatttttagtaagggcggggtttcttcatgttggtcaggctggtcttgaactcctgagctcaggtgatctgcctgcctcggcctcccaaagtgctgggattacaggcatgagccaccgtgcctggcccctgaaatgccctcttaaaaatgaagctgaaatgccatcttaaggacaacttgtgatgatcaggcatcttccaggttaaactgtatacccttaattatgagcctgtcgatgattatctgttctacatctactatgcagaatacatgcacctagaaataaaaggggagggggaggaaatgagtgaccacttaacattgatcaagtggcacacatggggaatttgttctttttacaagtccagatttctggtctccagagggaaaatgtttccaccattggatacaataagactcgtcttaaacttttctagaaagggccttaaaccccttagtgatgaaggcttgagttacctcaatagtcataccacctacatgagcagagccgctaactcagggcaagtgaaaacttgaagttaggtgaccaggcaggtgatgagtatcaaaaatggcttcaagatcaactgcagcagcatagcctttagtcccttccatgaaacataagaaagaaacctagagtagctcagtttaggacaaatattaaaagatacatgtgactatgaatgatgcaaggggtggactatagtggatactctggttttctggccagatgatcctcttcagggctgacacatccacaccccttctgttactttttatttttatttttattttttttttgagacagagtcttggtctgtcgcccaggctgcagtgcagtggcgcgatctcagctcactgcaagctccacctcccgggttcacgccgttctcctgcctcagcctccggagtagctgagactacaggggcccaccaccacgcccagcttttttttttttttttttgtatttttagtagagacggggtttcactgtgttggccaggttggtctccatctcctgacctcatggatcagcccgcctcggcctcccaaagtgatgggattacaggcgtagtcaccacgcccggccgccttctgttattaatatcagctgccaaaagctctcagttgcatccgtcaacagaaattagccttagccacaggaaactgactcaaacaatgtttcattccttcccaaggtggctttcagtcattgtttggctgatgttgtgctatcaagacccagctgctttgcttcaatttgaaaaagactctaatctgaagaaccatcacagcttcagagttgtcagaacacacacaattcttgattatattggtgcagttcatggtgcccccaaataattagaatagtaacatcaaagatcactaatcaaaggtcatcatcatagatacagtgaaaaagtttgaaaatattgtgaaaattaccaaaatgtgacccagagatatggattgagcacgtgctgttggaaaaactgccactgatatatttgctctgttgtgttgccacaaacctttaatttattaaaaaaaaaaaaaaaaaaaaaaaaaaagcacggtatctgtgaagcccaataaagacaggcatgataaaactaggtatacctgtacttatttctgatggcttcaaataaattttttaagaagtatattgctccatttttcagggtcatgagtctaatttaccaaattttaaagcaaatattttatattcagctacacagataaatttaatttgtaatttgaaatgcactccacaaaatgcttgttgataaaaatccattataagttagttggtaccatgtatttataaataaatggtagattatctcctttctccataaattaccattttaatagagtatttgacaaccctgagagattaaaccgtttgtatacaattttcaattctttgtgatttttagtaataatttttaaagaaatattaacaaaatggtctttactaactaaaatatgtgcaatactatttctttgtcttctgaaattaatgtgtagggaagaaatgtcaaattccaaaactatcttaatctaatacattaagtgattatttaaaaatcattttaatcagaattatcactcagtgtattacatgtcctaatatcttctcaccacctatttttgcccccttggcaaaaataagaaaagacagaaaatgaggtccttttatactgaaatgaaaacttcaaaggtgttattgaccgtttcacatcacatcaagactatattgattctggtccagacaaactattggtaatcaagagcaagtttagagtgattgtagaagatgtgaatttttctacgtcagcaaaagaaaaaaaaaaggcgagtcaggtttattattttattttattttattttattatactttaagttttagggtacatgtgcacaacgtgcagtttagttacatatgtatacatgtgccatgttggtgtgctgaacctagtaactcgtcatttaacattaggaatatctcctaatgctatccctcccccctccccccaccccacaacaggccccagtgtgtgatgttccccttcctgtgtccatgtgttctcattgttcaattcccacctatgagtgagaacatgcagtgcttggttttttgtccttgtaatagtttactgagaatgatggtttccagcttcatccatgtccctacaaaggacatgaactcatcattttttatggctgcatagtattccatggtttatatgtgctgcattttcttaatccaatctatcattgttggacatttggcttggttccaagtctttgctattgtgaatagtgccacaataaatatatgtgtgcatgtgtctttatagcagcatgttttataatcctttgggtatataaccagtaatgggattgctgggtcaaatggtattgctagttctagatccctgaggaattgccacactgacttccacaatggttgaactagtttacagtcccaccaacagtgtaaaagtgttcctatttctccacatcttctccagcacctgttgtttccacgagtcaggttttgtaagacttgtagatgatacctcctttgtaatggcaatttcagaagacattgtgtttataagtgtggcattgcccaagcagcacacaagagtgtcagtgccagagatgtgtccccatcactcacctgctttgggtgatgagttctgcagtttctatacagactaaatctgctacagtctccttcaaaaacctagaatttccttgttgccacacataatctctcttttggtaggatgattataagcctaacaccataggaagttcctaattttgcaattacattattttttaccatgtaaagtatgactcaattatctactgaaatgtccatttctgaattctcatatatccttgtgaggcaaagaaattatagcacattagagacccaatatttaatgaggtctaaagcaataaaatacctatagctaccttgtaaaatatggtaaattgactttattttttttttttgagacagagtctcactctgttgcccaggctggagtgcagtggtgcaatctcagctcactgcaaactctacctcctgggttgaagcgattcctgtgcctcagcctcctgagtagctggcattacaggcatgcatcaccacgcccagctaattttcgtatttttagtagagatggggtttcaccatgctggccaggctgttctcgaactcctgacctcaagtgacccactcacctcagcctcccaaagtgctgagattactggcgtgagccaccgcacccggcctgtaaattgactttaatactaacataacatgtcaaaacactgataaccgccagcattattttacagattatacattatattatattatgctatgtgtctctattagagtatatacacagtagtataatatatacaaatatatatgcgtatatttatacatacatacatatgtacacctgtttcaatcattcatttattttttattcattaaaaatatttattaaaatactaacatgggacaggcactgtgaggtatcaagttaccaagaaagccatggtatctgccttcacaaaatttacaatttagtgaagatgataagagttaatattattagaaagactattaccagcatatactcgtcaccgggttaaatatttccttgtattatctgatataacctttaaaagattattggtcaataatataattaaatcttagaaaggaaacctatctagagtctttcagttaacaaacagcatgaaactaggttcatattaacacagtctaggtgctcattccataaacaaggtctatggttattcagaccagagactgagaatattgagcaccctgggctcaataatgagctctaataatatgagaatatttattaagcatcttcaatgtaccagagaccataacagaaactgggaatagaataaattaataagacaagttactgatttttttagaacttatactctaaaaagaaagatagagtaaacaaataaaaataatttcaggtacggatacattttatgcatggaataaagtgaggtgagtgttagagagataatttcaagaaggttattttacatagggttgtccgaggactcctctgtaagagagtaacatctgagaggagtcccaaatgatgtgaagatagaatttctgtgaaagccttggtggaagatcaaggagacagacctggaactgggaacaagttccctgtgtttaaggagcaccaggaaggccagggccaacaaaggtgaatgagtggagagtgattggagatgagcgaccctcttcaacacaggttaaatcatattgggtcttgttgacaatgacaaatgggtttagattagacttagagtcaataagaaccaccattgatcaatggaattgttatgacattcagcaaaaggcttagttatatcagggcagaatgaaacagctattgattataaaaatggaagtaaaaaaataggaggaagaaagagtcatgatcaaaattatatttcctggatttgtgataaacatttcagatgattaataataagaactaatgaaggtattaataataataataacagtttgatggaaacataaagtcaatttatgttaaaaatgccatattatcttcttttgatcacatcatgcatacatgtgaaaaaaatatttcatgacattaaaaaaagtttgcaatgcagagaagtacaagataataatttaaaaaacataaaacaaaataaaatcttgaaacagcaactgaagcctgaggatggggcaaaagagataaaagaaaaccttagagtcccacacactctggactttcagttttcatgctctagaatggggcaggaaatctgagatggcaagtagttgaaggcaactgctctttaaaactgtagtccagggcagcaaagtaaagagaaagatctcccaaagtgcatggccgggtgtggtggctcatgcctgtaatcccagcacttaggaggccgaggcaggtggatcacttgaggcaagagtttgagaccagcctggccaacatggcgaaaccctgtctctactaaaaatacaaaacttttccaggcgtggcggtgggtgcccataatcccagctactgaggcaggagaatagtttgaagccaggaggtggaggttgcagtgagatagcgccattgcactccaccctgggcaacagagtgagactcagtctcaaaagaaaaacaaaaagtgcagaaagctaggggtgggattagagagccagaaaaattcaccaactactcacaaagtggttgtggagcagactcagttatagcctgttttttcttgcttatcatgtactttctttcttcttattcaccatatgccttcataatacaccaatttgtattttctgataaataattttgtttttaaaagaaaaaaaagaagaataccatgttgcttgaaactctctgttattctagctttcagtgtcaaaacagcatagaaaaagggttgatcttcggttggtgtcatatgaagctggatctattatctgtctcccaattcaggtcaggtgataactcagtaatatgacgggcgatgcctttgtcttttgttgacttagacaaacattctaaacctggccacctgatccctgaaatcaaaaaaggactctattgttactgtctaatgtgtcatggattatttagatttcttgttcttggtgagatttgcctcgattttcctggccataaacctgccagaatcttcaatgaaaccaagttccagatacttcacatgtttatgttctgcagtgtttgggtcactttccttcttgtatggcagagaaggggccagccgtggtagccatgaagattttccatttcattgtctctcaggactagcttattattgagctgcatctttagggccagttagaaacactctataaggtttacataagacaagcacattgtgatcaaagttctgtaaatatttacctggtaattcccccaaaaagtgagaattaaaaaaataaaccaggatattcttgcagtaggataatgggttatattcgagtccctcttaccctttctacttaaaaaatgttgttattttgtttctttagagtgtccatcctcatcttcggagcctttcaaactttaccgttatcttgcatttcttctattttgcctcttattggtaaggcagactgcataaggtacacattgtaatatggcttttcttatgctgattttaacttactttgtatatttatatatgagtatactttaaccattgtggaatttgtttttctgtactgtatgaaataaatatacatttcttttattggaacaaatagccaaatttagaactattgaatggatcacatgttgttctgattggaaattaaatttttatcattaaattttattctatacatagacaactgattctaaactactgttttgttccattgattaatttgttccaatactactcttgtttagttattattgtgtacctatacaacactttatcatagttttttagtatgtttttatatctgatcaagaatgttcttcattgttttctggtaatacatccactacaaataaaagataaatgtttaagatgatggatatcccaattttctgatttaatcattatacattgtgtgcagttatcaaaatatcacatgtagccccaaaatacgtacaactattatatagcgataaaaagtttaaaaactttatatttggaagcttaaaaaacaaaagtaaattttatttttcttgcccattttcccctcctatgaacatcaacatcataacagggtctacgaaatttctgtcgggatttttagtaacatttaattgaatatacagtttgacagggagaagactgattgcttgaaattaaagtatttctagtcacagacatgacctatctctccctcccaagagtcaatttatttttgtcacttattagatatttatacgtcttcatatataacttaaagatttcatatcaaacctatttctaaaaagtcatctattttttttcaacaaataggatctttctataaaaatatataggtcattgtgactttttgttgtgatgttttattttggacattgatattgcatctgacttattggctgaactaatttataagacctactattgtgtcagtttattgtttttgtagatattacatgaaaattgtgaaaatttagcaaaataacctaaaaaaggcaaataagaattccaaagggaagcaaaattgtactgcaactgataaatatatttgggaagatttgattatcaagtttaattttgttaaatctctaattactaaggtattttgtcccaaagtcataatttacaaaaaaaaaattgtgtgagggaaaggtcatttttaccagatgtcacttaagggcagagagtacctacagcccacttattcttctctatatcatttatgaaatgtttccccagatattaccttgtttcaattaaatgctattaaatatgaaatactgcaagaatttaaatttgtctgctttgtaagcgtatacatgtccatatgttaatatatctttctagttcttattcttctcttgataaaacaacaaaataataaaacagcaatttgaggaaaagcagaaaaacacaagttcatgtgcaaagccctttctgctcttcgtactcttattagccaatctgtgcagtcaaaatcattgtccctcctaagaggtggtaaatgtgttcctgttgtgtaaataaaccagggatggtgaggtaactgagtcaagtatttgtaatgtagcaactccatattttgtagctcaatttttttaaaaaattagattttatttctaagtgtcatttgaattttgtggagaaagcaagctaatttattggactttgccccattcagtactgaaagttattttaatttccaaaatcatctaaaacactaattgcaactgttagaggcttgctgtgtttattgttactgtaaactcatttaattattagttccttataaattgcaaatatttataggggtagatagccatctcttaagctgcctttctgtagccagtagaatgaactacatactatcaaaggacccaatttgcaaaatataatgaatttactatgcattaaagaaactcttcctccagtaagttttcctctgacctgaaaattacaaaatattaccaaaaacattaaattatctttcatataatgacctccaaataagtacttttttcagactctgaaaaatatgccattttgaaaaatggttttttttattatggtaaaatatacaaaacaatttacactttaaccatttttaaggagacattttagtggctttgaggacattaatatttttacaattaattcatttattttaattgacaaataagaattgtacattcttattatgtacatgtgccaaagacacttaaatcaagataaagtacatgtattatttcagtccatgacactaaagagagatattggttggaggtctgctttcttgcctttattattatctaacaccttgtatcattaacatcacctggagcttatgagagctgctgaatctcgaaccctaccccagacctactgaattagaaactctgatggtagaagcagcaatgtgcattcccaacatccctacaagttattcagacaaacaataaagtttgataaacactggactaagtaatgatccactcttcatgaaggagcttacattcctcgtgggatgatataaacaaatggatacctaaccaagaatggaagtacaggcattacttctgaaagaaaatagtgtggaagaaaacaaaacctcctattctactctaggtagaattcattgactcattaatttcaggggatactatgataataactacttatttatttatctttattgctgatttacaaagtagttttcagtttacagatgtgaaggctcaaagaattaaaaactacatcaattgccaaaatcacacatctagaaataaaagtcagtgtttaaaacccatcacccctggcccacccacctcttgcaaagctacattccttctgccagatttcagggccttcacttcaagacaagcttatggcaacctacaaagacaatttaaaaggcctgttcagaatagatgagacacttgtctgaggatggttctagatgattatgttatttatagtagatgtattgttaggttgtttttttcaacacacttcattttcttatgattgtcatagatcctcaaaatctccacataaaagatctagcgtccaaattccactaaattgtaactgtttgcttgtcactatttcaacccagatcctttagcactgtaacaatcactttttaagaaactaaaaaattcactgagattttcctcccttgcaaaaacaatgcatcaacacacacataaatatgtgttcaaccaatattgttcataaaaaggcagatcagtttcctaaacagaaaaattattgaccactctgggctcaatgcctgtgagggtggggaactctgaacctcactcttcttctctttgtatcattagaattcaattaggagacttttttttttttttttttttttgagacggagtttcgctctgtcgcccaggctggagtgcagtggcgcgatctcgactcactgcaagctccgcctcccgggttcacgccattctcctgcctcagcctcccctgtagctgggactacaggcgcgcgccaccatgcccggctaatttttgtatttttagtagagacggggtttcaccgtgttagccaggatggtctcgatctcctgacctcgtgatccgcccgtctcggcctcccaaagtgctgggattacaggcgtgagccaccgcgcccggccggagactttttatttaatgatattccaaagggctcatacgatttgaattaggatttttcggggtggatgcaaatcagttggtcccatcttcataccatctctagcaatgtccttgtttattaattccacaatttctcacactcgctccccttaactgagttttaggaaaatgaatttgtctttcctctttttatccttagcctaacccatatgaggtgcaatacctttctgctgagtgaacattacataaaatagtttaattcctattttataattactgtaaaaaaaagaaaattgaaaacttctgctattacattgacaatattcctcttctaccttgagatttgatggatataaaacacaaatacccagtgctattatgttctgatcatttatacacttattttatctttatatccatataatgtaggtactgttaccatctccattctaccaatgaggaatggagactcagaatggctttgtatactgcccaagttcatttattcactaagcaatggggtcaagatttaattttggcagacttgttctagaattcgtgaagattcttgttggacagtcaactttacaattctgccagtctggaattattctgttgccttcagtcagagctggaaatttgttgggttattactttttcagttattcaatttaaaaaattattaacatagtttaggaagtaattgtttatttttattaataaaatattgttatagtcaataattatgttttaaaaatattaatgcacttcttcataaccataaattttaatttccaccttaacatacaatatatggtttaaatgttaagtataaactattattgaaaatgatggaactgaaacacagccttgaaattccaatgccaaagtgatttgtaaacttctataaattacattaaaagcactaacaactgaatccattcacaaaatagtcaacacagtggttctattgcagtcatcttcacaatcaattcagcccaatgagaaaagacccatcaatcaatcagccagacatttaatcaaaacacacaataaaaaaatatatcagaacaaggatctgaaatgaattgaactttgattacttgaataccaaagatgcatgaggtttgagagctgagttgccgctttatcaaacaaaagatggagctactttctttttctatgaactggattgccctgcgttactcagaatggagtttgtatcaaccaatcaattttctaaaaagcaattatttctccccaaatgtttacaaataacaaagtgcataagagaaaacggtataatacatattttgttttaaaaaagtgtctgcagaaactcatactttttttaaagtacaaattaccaaatgtcagaaaataccaaatcagaaacaagatgaaataaaattgtactgaaaatattgatttctggcatgctcatttggcccagattcaggcagcaaagtgtgtggtttcttatctgagatcctaagagtcttacaagctttattacaagctgtacagctgcaggaacatcaacaattttgtcacctctttcaagttcactaaatagtaataaattttttgtttgtttgtttagttaagaacagctttgttttcgttaagccagtaagtcccacaacatttttaagcactggactgaatatcactcgatagctaatctttatggttaatcactgaattaggaacgatttgcattacttaaaagcaagtaaataattaccttccactggggaagtagctaaaagttggaggtgggtttggacttaagttttaaaatatagtagggaaatgaactgaattctgttgctgaacaaattcatcacacctcttcaaaaatatatgagtaacattgttttctaacttaattttattattctgtgatggggtgccatattactttgaaaataattgtcttccaaatccagctacaagaattaaagtgcaaatgaacttcagccaaacctctaaggagagtcctatatgagagtcaaccatatgagagtcaactacatttgtgagtctgaatcactagttcaagtttcatccatattttgtggaattccgaccacaacatcccatcaagaaggtactagcaccctttccttgcagtggaggtttatgtaaagctctgtcatccaaactggatccaagtgagtaaagagtgttgacaagttcctttgctcatacgaataagcaataccttcaaatagaaatgttttttttttcagcctaatgctatttctattgggttttgggctgcttctagtattttgagaattgggcatacttcagtacgttggttgtccccaaaatctcattcccaatatagttagcatagacatatgagcaccttctttcactgttggtcagtcaatcgcacactttctgttataagataaataagttctgagatctaatacacagccatgataattatagttaataaggctttattgtttacttgaaatttgctaagagactagagctctagcattctcaatacacatatacaaaatatatccatgtgtcgtgatagatatgttgattaatttgattgtggcaattattacacaatgtatacagatgtcaaatcatcatgtggtacatcttgaatatatataatttttttttgttgattatcctcaataaagctggaaaaaattgaaaaaaaaaatgtagtcaaccaggaacaatggctccaacagagcacccagaaaatttaggcaaagacttctccttccttcacttcttttgtccttcctccacttcttttggtaaacattttccttcacatattttccagtagagaacactattcttgttcatcccagaccaaagaaatagcttgaaaacttgatatgctgcttcctactgatacagacaggaaaacggtaaatactgggtagaagtgggccattccctggcaaaggccccacccttaagcctggactcctgtgaccccaaatgggaacaggcattcctgtttttgtacccaaaaagttaccggttggccccccatgactccgtatcctgtacccatatacccatataaactgcaaagcccagctccagaaggggataagaagatgaacagaaaagcagaagaatggcagaacaacacagcagaaagaagaagtgtctgaacaccaagaggagttcagctgtgggctgtcagagaggagattgtctgctggagggccaaactctaggggaagattatcttcccactccagcccccttccagctccccatccatcctgctgagagccacctccacaacacaaaacaacccttgcattcaccgtccttcaagtccgtgtgtgacctgatccttccaggatgccgaacaagagctctagaatacagaaagctgtcacactggccctcagagatacagaaagctgtcacactgcccctctgcccttgcaaaaaagcagagggtccactgagctgtttaacacttaagccatctgcagacagcaaaactaaaagagtgcactgtaacactgcccacttgggcttcgggggttgcagcacctactcctagatgctaccatggggccagagcccagaagtgctcaccctagctcccgttcctgcccatctgcatgctatcccttctataaggagtttgagcactggtggtggcctaataagcgtcacccctgttgaacatcctacgactggggtcagggaactctcccatttcactactaaacctatcagacaagagtttctctattattgctttgaaaacatactagtgaagggtatagcactaagcagggaactttgaggcaaaggagcgacccatgattagagctacaaagaactaaattatactcagccagagacaaaagtcatatcgcagccttttgccttggatcttacccaaatgcccagcatccttttggccctgcccctatttattttatatttttgacatatttttattctgaaaacctcatccactgctgaattctggatctggcttcgggaaagttcccaaccttctctgtgcttcagggtcaccaatagtaaaataagagttatgatgttaccagcctcctaggtgatttaataaatgtaacctgtttcaaacaataccatagtaagaatgatttcaatcaacattagatagtgccagttttgtcttttacacttgttgaagcatccagcaaatatgagtgatcagattactatacaattgttaaaacttgagtatcatggacattgacctattgaccaaaataagcacttcattctcagagaattcaaatcactgtgatttgcccaagtgaccagagctcccaaatggagaaaatgagaccaagtatctttatgtttagtccaaatctctttctagagtactctgttaaaccaatatattagacattttctacagttgccaagagaaccaatctgtgagatttactataggttcacactttgattctttggtgtcagactgccaataagagggaaggtgcaggttctctaataccttcttgtggatgagtgttagtagcactagtgatagtagtggcaaaagtagctatcttactggtcttaggcatcatgtcctttatgataatctcacaactgatgctcagaatgaccttgtgaggtgtatgctattactacttatcaaataggagactggagtttaggaaggctaagtaacttccccacagtcaaatctgtacaatggaagcctctaagccttgatggggtttcaaggtttcttatttctcggagctatttttcacagatatggaaaatccctgaaaatggaaaaggatgtctaaggtaagggatttatctgactataagactgtaaaattcctattaaaatcataggatttagatttgaaaaaaaatgagtgaatcatgattctcaacttttaatttggttaaatggaacataaaggtaggaaagattgagccatctgtacagggtcacccacctaattagtaatagaagcaaaattacaatatatattctctcttcttatgtaagtactccctctttattatatttcttccttccctactcccaaaatcaactttttctatttctatggaaagcaagtttttgcttttgtggattttcacagaacatgactcaaggtagaattaaagtcactccaaaaccaaagtcaatttttgacttctagacttagtctatgggtttccttttttttttttcccaaagccttcctcccctcactaacatccatatacagtgtgaaatcctcttcaagattgtttaccagacacatctctatatgtcaagcctcaaacatgtagccccaatccagatctagaaacaacccatggtttctcaaagatccacaatataggtgtgcaaactaaattttaaagtaagtgtcacaatgaaactggacccctatctctcaccatatacaaagttacctcaggatgaattaatgacttaaatgtaagactttaaactctaaaaatactaaaagaaaacctaggaaaacctcttctgaataccgtccaacactcatgactgaaatgttgaaaacaagcgcagcataaacaaaaacagtcaaatgggactttaaactaaaaagcttctgcacagcaaaagaaataatcagcggagtgaacagagaagctgcacaatgaaagaaaatatttgcaaattatacatctgacagaggactaatatccagaatctacaatgaactcaaacaactcaactaagaaaaccaaaaaaccctattaaaaatgagacaaatgacataaacagacattttcaaaagaagaaatacaaatggccaacaaatatttgaaaaaaaaatgctcaacattgctattcatcagggaaaagcaaattgaaaccacaatgaaatatcatcgcttaccaatcagaatggctattaataaaaagtagaaaaaaaataacatgttggcaaagattgagagagaaggaaacagtcatatacactgttgatgggactgtaaattagtacacattctatggaaaagagcatggagatttcttaaagaactaaaaatagaactaccatttcatccagcaatctcaccactgtgcatatacccaaagggaaaaaaaaatactagcactcgtatgcttatcacagcattattcacaagaaaaaaattatggaatcaacttaactgtccatcaacagatgattggataaagaaaatgtggtatatatttatataccatgaaacactaatcaatcataaaataagaataaaatcatgtgttttgcagcaacatggatgcaactggaggccattatcttaacttaaaaacccacagaaacagagcatcaaatatcgcatgttcttacttataaaagggagcaaaataatgtgtacacctagacacagaatgtagaaaaacagacattggagacatggaagagtggaagagtgtgtgcttgtgggggtgtgggataagaaattacttaatatgtacaatgtgcattatttgtgtgatggtttcactaaaagcatggacttcaccactgtgtaatatacccatgtatcaaaactttacttataccccctaaatatatataaatacaaaaaaaattctaaaaactcagtttcaggagatacgttgcttgaatttagaaaatagaattcattctactatatttcataggttaaacaatgaaagaagaaagcaaatataaattcaaaacaccttcatatgcaagtataggtagaaaaacatgactatacataaactgtagaaatcactacagggagggcaatgaaactaatgccatgaaagaacagtttatttattatatttactttaaaatggtcaatgtttgatgtagaatgtaagaccttgcctacattaggaatatgaaaaaaactgttctgcaaaagaagaaggaacaaatagtttgttcttccagagagaagagaagagagaggataaacaaaactcagagacataaagccagttggatggcagaagacttcaggctacagtattggaccatttccctatgttaccatcttccccagtcaatctgtaaactcataaaattcttgagggtaatgatttctggaaataaaagatatcaatccctcactgaaattattatgcggtagaacagtggaatatgagcacataaagtcagaaagaaacacgtacaactaacctagagaatttaactgtaactgctacaaagccacagcattgagatatggtcagttctcaaagaaacacatggtaattctcagagaaacaagaagccccccttcaagagttttctccaagttgaaaattcatttattgcatcagaaattaagactatgagctctagagagagaccctctgcattttaatcctgactctgccactactgatctgtaaaaccttggttaatgttcttaagctctatgtacctctgtaaaatggaaataataacagtctcttcattttaaggttcttttaagtattaaacaaaccaatgagagagaaggcagttagcggctggctaggcaggtagagaggaagggtctcgggagagaaaaagcacctatgggatcgcacctccaccacccctgtagctagtaggaggaaatgtggttaagaatttcctcttaagccaaaatgtttgctcagaagggactgtcccaacttaggcgcaggtgcaataaatcaactaaatgtccttatcttgacctagagctaattaacatatcactagcattgcagctttagcccctccataggtttcccttaggcactcaagggtaataaccaaggtggagtagctatggccaacaccaggcatgcgcagatgcaacactcccggtggggaacttaatctttcctattcaggcggaacccaaagaagacttcctcgcttctgccacataaaatacccagaactcagccccatttctggaaaccatctttcagttcctctcattgctgagaacttttctgtcacttaataaatcctactgtactcactctttggtgtccctgtgccttagtcttcttagttgtgggtcaaaaacttggaattcactaaaggagtaagaaggagtaagaagactgttaacaaccacatactgcatttataagagtgtctggcccactgggaggccgaggcaggtggatcacgaggtcagaagatcgagaccatcatggatagcacagtgaaaccctgtctctactaaaaaaaaatacaaaaaattaaccgggcgtggtggccggtgccgtagtcccagctactcgggagcctgaggcaggagaatggcgtgaacccgggaggcagagcttgcagtgagccgagattgctccactgcacttcagcctgggcaacagagcaagagattctgtctcaaaaaaaaaaaaaagagggtctggtgcagaatatactaaacttgttagctattatcattaatagtaaattttccaacaccattttataacctgtttccctacaactagcaatttggcatacaggagttcaggcctcaccatattaggtcaatattccaatttaatggtatcttatcctctgattacacactttagcctatgcagctgtgtcacatggttaccatgttattcagcttccagattcctgcctccttatcaatcccaaatgtattaaatatattttcttcctctgttcagtctttggatttgcaaattgctatgtgtctccattatggtcagacaacataatacagtttcccaggccagctgggaggattgtcacactgccttgttctctaggatcacctctacaagagtaaaaaataataacaacatctatccttcatttttcttatatatttctcaagattactttccccaattgtcactttctttcacacatgaattctcatttatgaccttcatgtctgctgttttctttcagtaacaatcagatcacaaaacttatcaagatcacccaacctaagaatacctcctcaatctaatttctctccagataacattttactattatagttttcaataggatagtccattcacctttctttgccatcaaattatttggcatgttgaaatctgatttctatatcagtaacatttagacagttgttaaaacccgttagaaaagaccatttgtgtgtataggggtgtgtgtgtgtatgtgtatgcatgagtgtatgtgacatgagtacctgcatatatgtgtttccttgtctcttatccttttatatctgtgacatgtgtcattgtggactcaactgtcctttttgaaactctctttccctttgacatctgtgacaccaaatatttttctctctctctgacttctttacttagacttcagagtgatgagtttattgtaaatctgctccttaccttgcttacaagattgattcttattttgacaccttccttatcttttttaggttaatgcttactattggtttgaatcatctttatatttttatcttaatcactgaaaagttttgatatggctattcactgttaaatacattttgcttgacacattttttttactttattcagtctcctcctgaaactagagctctgagttacctgtaccatggattgttaatagaccaccttgttattcaggatatggtccaagagccatctgggagacatagcccaggatcctgacagttcccatcttggatgctgactctagaatcctagttccagacaccactgaacatcccttgcaggcattttagaaagtgaccagaaaactagaagatctggtgtggctgctaagacattcacatccaagggaatcagcaaacgctttatattaacatgtgtggcttttatttatttatttattttttgagatggagtctcgctctgtcgccaggctggagtgcagtggcatgatctcaactcactgcaacctctgcctcctgggtaaaagcaattctcctgcctcagcctcctgagtagctgggactacaggagcgtgccaccaagcccagctactttttgtattttcagtagagacggggtttcaccatgttggccaggatggtctcgatatcttgacctcatgatcctcccgcctaagcctcccaaagtgctgggattacaggcacgtgtgtgtgttttttaaagattgtaaagatgtgaatgagttttcatttatcatttttgaatatacaggaaaagtaaatgaatttatgctgtgcattgtcaaaggagaattctcataaaaacacaaaaccttttcacaatcctaatgaaagaacattaagtctgattccatcattttaccacaaagaagacagaaaatttccaaagtcctactgttagtagatattctagctgactcagttcagtgttgctatgattaaacaagagtgagttccctaaaagtaaatgttataagaaatcttaagtattattttcttatgtttctagcctaataaagtgcttttattaaagcactttatttaaaggcattattgatatttcattatgttcaacagatggagttaatgtgaatgtttactcttcagatatcttttcatttaatatacaaagatatagaaaacagaagagaattgtgggaaaaaatgtatattacaaatgaaatttgagttggcttacaaggaaagcatagataagacctatactcgcaggagaggttaagtcaaaaccacacaataaaaggcagttgtagagaaatgggcagtgatactaggatcacttagctaagcaaagcagtaacggatgagtagagaactagtctgaatgtgcctgcaatcacagtactagaaaaaatcaagtcagttgaatggtatatattttgtgcaaggtacaacagcttgatgaaagcagcatttttttttttaacaacattggagttagtcaccaaaaatattgatcaaagtaacaatattgtcattaacaacacttggtctgagaagcttatgaatttttttgaattttacaaaaaacaatcagcatgtagctttttcataaattgtcctttaatgaaatactgatatgatggtgtcatgaggtaggatcatgaagggaattgttagttgttcactactgtgatcaaatgacaaggatcaagtatctttctcggatcactactttcaaattgaatgttgcttcagttggtgttctgagaaaagtaattgacatggttattagaactaaactttccaggtgggtgggctggacttacatagacatcagagggaatgcctgaagggaaagaagactttcctcagaaagcagttgttgatgagctcccagctcacatccttgcttaaactctgggtaacataaataaaaggctacagcttagagtacggaagagcttcttttgtcattttgcagaataatgaatctcaattagtcactgaggtggaagaccataacagttcaagtgatgattgttcatttgttttaataaaaggctggacactttatggccaaatctgatattcttgacttcataggcatttgtgccattagtggtggcccttgttggaacctgattgacactagtttttattaggtcctgaggactgagaataaatggagcttcatcagtcactctgcacttgctaattctgtgggaatatgtcagccaactttgagaaaacctggttaattgttagagactttctgttgaaaaatgatttcagttggttacagctagagataatattcactgagaacagtcactgaacctggatttgggtagaggatcttgaaaagttaaaagaagaaatttcttattaaaaaagattatcttcaactaataagattgtattttattttattttattttattttatttttgagctggaacctcgctctgtcgcccaggctggagtgcagtggagaactcggctcattgcgagctccatctcctgggttcatgccattctcctgcctcagcctccagagtagctgggactacaggtgcccgccaccacacctggctaatttttttgtatttttagtagagacagggtttcactatgttagccaggatggtctcgatctcctgatctcatgatctgcctgcctcagcctcccaaagtgctgggattacaggcgtaagccaccatgcccagcccaaaagattgtaaattgttcttccgactataaagtttactagtcagcaataaatgaattagatttctttttctttgatgaagtgactcagtatttttacatatgctccaaataaaaaattcagaaagtagtgtaaataatctttcagaaagaaggcttttcaaaagcaaagatactacaatgaaagtagtattggcaatagtgctctgctttcacagatttctgtgtaggaatattttcaatcaagtaatatttttatgagctcctttcaagtattcatcaatttaaactaaatcctaactagattagaaaatgcagtgtattttaaagttattctcaattctgcaatctttgcttgagattctgttaatttttttaaacttctgagttttacatagagtagtaaatatatcctggctatattataccattaaaattgtaatattggagtataaaaattaaaatccttgggatcagacactaaatttcataataaaatatccttcctagtagcaatgtgtaataagaaagcatttttaacctagagagattgtttcccagtgttgttatcttcttcattttggaaggaaaccatatcagcacaaaacataattcaatgctcagtttattgaaagttattttatttaaattaaatatatgtgtaataattaatgattagcaaattaaatgatcattaaaataaaattttaatctattttattttgaatgatatgaaacatgctccttacttaatgttaagtgaagaaaagagagtacagaatgacattttaaccatagccaaccgtgggaatagatagaattgttcttttctcctttcttttttctatctcttctaattctaccttaatgaacttaatggcttagtaggtgtaaaatgatgatcttgtgtttgttatagtaaaagtaaaaacctatcaatgtactttttaaaaagcatcctatgtttatgaatatagtctcattccaactgggtctcacatatattcacatatttcattttagaaattgttcccacatcttctgaaaattagagattgtgatttatatgaggttagacaggcaaagcagctatgtataattcaatatattgtttaccttacaagagcaccctgcccttcatccacctgtgaaaccacaggtttgcatctacccagggagatgaaggggagaagtgatttttgataatttgtacaaaggcacagtataaactggtgggagccttgtaaacaaatattttctctatattaatatacacttctttttttttttttttgagacagagtcttgctctgtctccaggatggagtgcagtgatgcaatctcagctcactgcaacctctgcctcctgggttcaaatgactctcctgcctcagcctcctgagtagctgagactacaggtgtgtgccaccacacccagctaatttttgtatttctagtagagacagggtttcaccatgttggccaggatggtcttgatctcttgacgtcatgatctgcccactttgggctcccaaagtactggaattacaggcgtgagccaccgcgcctggctgatttgcatttctttcatgaccagtgatgatgagtttagaatggcaatcattaaaaagtcaggaaacaacagatgctagagaggatgtggagaaataggaatgcttttacaccgttggtgggagtgtaaattagttcaaccattgtagaagacagtgtggcaaatcctcgaggatctagaaccagaaataccatttgacccagcaatcccattactgggtatatacccaaagaattataaatcattctactacaaagacacatgcacacatatgtttactgcagcattattcacaataccaaagacttggaaccaacccaaatgcccatcaatgataggctagataaagaaaatgtgacacatatacaccatggaatgctatgcatccataaaaaaggatgcattcatgtcctttgcagggacatggatgaagctggaaaccatcattcacaggaaactaacacaggaacagaaaaccaaatagcacatgttctcactcataagtggaagttgaacaacgagaacacatggtcacagggaagggaacatcacacaccggggcctgtcggagggtggggggcaaggagagggtgagcattaggagaaatacctaatgtagatgagggcttgatgggtgcaggaaaccaccatggcacgtgtatacctatgtaacaaacctgcacattctgcacatgtatcccagaacttaaagtataatgaaaaaaaaattaaagtaaaaaaataaaatattgaaaaataaaaaaagatacatttgcaggatgacacttgtcaaagtgtacacattttccagttaatacctgcaaaatgctaaaaatataatcctttaaatgtgaatttaagatgtggaagtgttgggtacaagtaaagttgaatctgccttcacctctcacactcacctgcatcagaaggactacatcttccaactaaaaagaaaggatatatttctgatctctgttgagctgctatttaaattcattttctgggaggtatgtttttgaaggtgatttttaatgtcatgtacagagggtagagaaaagtattagagtcatccaatttacaaggatggatttgatgagaattgtgtttataataaggattatgttaagcacatcacatgcatcctactactgttctaatatttctaagtcatttttatacttattaccaacatgttttcttaatattttcaaatcaacgtagttgaaacgctgaggatggtaagcatttgcccacatgcttatttccaatttgtctggctcatcccatctttcttttcagaattttcgattattatagacatcacacaaaatgtgaagatagtgccccacagtgtattgtactctgtgcttgctaacacacaatatctacagaaggtataaataaaaattgattaggaagggttttacctgccatctggaagtccactatcaggcttcaatgaatagcttttaacacttacagactctaatatcctggctctttatgataatattctaagggcaaatatagttcatagtttctttttttcccttttagtctattaacctattacagttttgatttcaattaccttgtaatgcatataaaaataaattacagagagaaaatattacagagaggtttaacaagttaatggtaaattaaattcatactcttcttcattatgcaaatttgcaagctgcggaacatttagcactctctcctggatagcactcaacattttacatgcagataagtcagcagctctaatgaacttttgcctttcccacgcattaattcaagaaatacatactgaagtttttccaattgctttacaaactataggtagggtaaaagccagctcactacttcatacagagcattaatttctagtcatgtgagttagagtgttccttctgaaaaaagattattgtgatgagaaaagaaatgctagtgttaatttaaaattaaaatttttgaatgcactcacttatttctcattagagattataagatcattgagcaaacacacacattttcttgtcataattaatagatattactttcttatcttgcaatagtttccacttatatactttaattctggtagtatcaaaacataataaattagtttctatttattaacactgaaattttccaagcaacaattgttttttcaaactaacaatctaaatcttattctaaatctactttttctcaaattggcttataggttgagatgcagaatcatcttatacttctatcaatttgaaaaatgttggttctaaattgccttaacgaagataaccttaacattttctgtataacttcaattaatttcttaaagtttaatctcaaagtcttcgaaggacattcaagcaacttgaaagtataataaaggttagtatattcagaggtaaaagtagagcagaaagaacattttttttcatggatattgtaaaagaaaaattaaacagggaaaaatgaatgaaagagaaagaaagagggaggggggaacaggaagggaggaaggaaaaggaaagagggaaaaagggaaatgaaggagtgaaggaagaaagggcagaagaaaggatagaagagagggaggaaggaaaaggaaagagggaaaaagggaaatgaagcagtgaaggaagaaagggcagaagaaaggatagaagagagggaggaaggcaagctctttcaaagttacttttagtttttaaaaagtaaaacggataaatgtaaatgaagatagttatagttacagatatagatatagatgtaattttagctagaggatcagttactctaggttcagaaaaaaacaaaacaacaacaaaataacatgaaaaaaacccctgctttttctattgcatacttttactcccatggagtaaaaactgatttttaccattatctctcaataagattaccctcatatccttagtcaatacaactccattttggcaaaatatacatacttatactacctttcctgatgtttgcagatctttagagctacccaaatgaatactagttgtagttctatatatcatttttgattttgattacctaccaaaactatatcacattccacttgataaggtagacatagtagaagatgggcctaactatttgaatgtacagccaacatttgtttgaaaattaactttactttgtctaaaacacaccaaaaaattgtggttctccaaattttaagccaaaaagtacagtttaaaagctaatggccataattatcaatttttggccaaaattatcagttgagttatatgggttctctaagtaattctctgagaatgattagttttggaaccgatttttttttcctgacattaaaaagctcatgctagaacatacttccatggaattattagccattctatatggagtttttaggctttaaaagtgtttataaaacagaatatatatatcctctaatctcaagtgtcctttgattctaattgttaagaattctgaaggcgtcacagggcatggtagctcacacctgtaatcccaacacttttggagactgaggcggacggagcactttaggccaggagtttgagaccagtctggccaacatggtgtagcccccttctactaaaagtacaaaaattacctggttgtggtggcgcactcctgtaattccagcttctcgggaggatgaggcatgaaaatcacttgaacccaggaggcagagattgcagtgggccgagattgcatcactgcactccagcatgggagacagagtgagattctgtctcaaaaaaaaaaaaagaaagaaattctgaaggctctaactaacctactttcaaactcagttagcctgcgacactgctacagtttcatggaagctgacagaagacatgagattcctggctctggttttattattcacagcaaaagaagtaactaaagtgaaagcatattcacgtccattctgagacccagttcccacaaagagaatgaagttcagcctagacatttacacacacagtgggctgtgtcacaggaagaaacatttatcttagggaatctgccactttgcagcattgggtaagtaagcctctttgtcagagaaggagaagatgttacttcaccctcaagattgctcactgcaaacacaaccttggaagtgtcccaggtagagtggtcagagacttacctttaattctccaaattaaaagaaaaacttatattgtcgactctgctacaaaatgtaaagtatataacattattctaacatgaaagtatcttgctgtttcttctgacacggagaccagaagtagatgaagaccaaatagaaagtaagagagagaggtagactgagaatgatcacacttgctataataaggcaaccattagtggaaatctctagggattctggagatccatctaaaaggagaacgaatactgtccaagagtgatggcaacaattgtgttctaatactttttatggaagtattccaaagtaccatgaattatttattacatgctagctacctaattatagttaattctgatgtttcttttttcaaaatctgtatgaaaaatatattgatgtcagttttcagttcttaatatggtgaacaaaactagaaggaaaataaaatagtttttcaaagttgcttatttggaaatctatagctcaagctgggattgagtttagcacttagaaagatacacctgcatttttgtattatagcacaagagttgctgtgtgggttggaagctggcagagctgaatgcttaggcatgtctacaattaagggcagtaagctcttttactgcctggctttttggacactgtgtataatgatgcacgtttaagccaattttcaagtcaggtattcatacttgtttacgtgatgctcttcacacagaaaactaacaactttattgcctttcttcattgacctactttttttcctcccatttatccgcctgaatgaattgaaaaacaggtagaagaggcatacatctctgaaaacaaaggacttgtgtttcatcttaagtgttatattgtttatagaatgcagacaataatttaacctctttccagtagcaccaacctaacttgcccccaggacatgaaacattgaagcacaagatgaaattgtattattgtggaaccactcatgactgaataagcctgcaagcccctgcattcactccactgctttattttgatgctttgttatgagctttgaagtggaaaagaaaatgagctctttgaaaaatacaagaaactgaatgtcattaacctcgtcactttatgaaataaattcccttccttccatcctcctttcctttcctcattccttctttcctttgttctttcttaaatgaaggtaaaataaaaacttaaatgccggaagaaaaacaacctttatttattaagcctaataagacgcaaattcacatgtgtacctcacttaattctcaagctgactgtatctgattcatccttatccttatttcttaaagctgaggaaagccaagctcagagatattttgtaacttgccaaagtgacacagttttgtgcaaacgaaggtcatcctaactccatgtaaaacataggactgtatggggtccagacgcagtggctcacgcctgtaatcccagcactttggaaggccaaggcaggtggatcatgaggtcaggagatcgagaccatcctggctaacacggttaaaccccgtctccactgaaaatacaaaaaaaattagccaggcgtggtggcaggtgcctgtagtcccagctactcaggaggctgaggcaggagaatggcgtgaaccccgggaggcagagcttgtagtgagccgagatcgcgccactgcactccagcctgggcgacagagcaagactccttctcaaaaaacaaacaaacaaacaaacaaaaaaaccatcggatagtatgatgtgatgctaaaaatacctaaggaagaaaaagaaacaatagtttctatttaacaggataatttgaatttatcacatttattttcatatcattctgacgggagtcactgtaagatttctactcaactccaacttctttgtgatataaatttcacttattctcaaataaattagtttatcgtacagctgcacatttttttttaaatttttgtttcaacctttcctgctacttccttgaaatattctcccgcagtggaattaaagggagaaatcatttataaacacgcatacaaacacacacacaaaatgccagaagaaagaatgccttccttggcatactctttaacagtttaactttttcctggttagaacatacaattacccgtaattttggcaattatgcattaatatagaaaatacataagggacaacataaagatataggatgattgtttttctcctcttccagtgtttctaggaattatttttaaaaattaatatattaacttatggcatattagggttattgacaaattactgttacatttagatataatgcttctacaaagaagacaatgataaaaattatccagggtaaacataaaacgttccttcttatcgggcagggagcgatggcttacgcctgtaatcccagcagtttgggaggccgaggctggcagtttgcctgagctcaggagtttgcgaccagcctgggcaacacggtgaaaccccgtctctactaaaatacaaaaattagccgggcgtggtggcgggcgcctgtagtcccagctactcgggaggctggggcaggggaattgcttgaacccaggaggcggagcttgcagtgagccgagatcgtgccactgcactacagcctgggcgacagagcgagactccgtttcaaacaaaacaaaacaaaaacaacaagtttctccttatcataaaggatagtttaaatttattgtatttatttctatgatatagtattgagaaatatgctctttaaaatatgtcatgtgtatgtaattttcatctaaaaatcttgaattaggaaatatttcctgtctggtagaccaaatggaatctttccaaagtagtattttggaaaaggagaatatatgaaattcagcaaaatttgaaggtaaataatatttccttgtaaaaaaaaaaattgctgcaagagaaagaaaaggcagtttgctcgtggtccttttttagctgctggctcattatttttcacagcaataatgacaatgagaattcagtacagtccgctttgtgtttgccttgttttccccgccaggagttttctgaacagaagtctgatgcagtgaggcttctatactattatttttgaataaatagtatatttcattataaccagccatcactaaggtgaatgggactggagtacttcaatatctgataagactacaaatatacctcagaacttataattttatgttttcagttctattaaataagctgtagaacatccccattcacctccaatatacgtgcctttgatttatagttttgaaattacatttcattgctatgtcttaaatcaagtattgattttcttcttaagtttaccgtgcattgaatattcattatatttttttagagtacagccatagtcttttatggtgattcaaagagattctagcaaaagccttccacgtattgatggtttttacccattattaaagacagagaagtaatgtgatttctaatttattttcatctgaaaatcatgaaacttttcttcaatttttcagcaccatttactcatgacagcttttatgaaaagacgagtttatatattcatccatcagaactagtagttggagatcacatgatcacatgtgacattttcaagtactgggattttctttgtgctggtaataaatatagccaaaggcctgtgccccaaactgcctgtgcctcttctcatacggtatggtactagcatttaataggattcagatttatgataaatgataaatacatgtttagttaaaataaagctacaagtaagctatgcagtgatttccaataataaaaaaaatagtatttataactgccaagcctgggaataaatctactgtcttctgtgggatttttttccccaggaaaccagtttaaatccttttgggtaacattgtaaaacaatagccaatgtgtttgttattagtgattgactcccagctttgaaccgacccttcattactcagttctgtaatgctggggctggaattctgtaaaaccaaatatttctcttctgtcaacaggatctctgctgagctctagcaataggcagcactagggggagacaaagatcccccttgcctcttgttcctaagagcatttccccaaaagttcttcactggagcaggagcagttggctccaatagcagcagttttgctggcattttccacatttcaaaacgagtctcattttgccccctgagaaatgatgcaccagttgccctgatcctccttcttagacaacttggtcacaatcccactggggcccctcgagattcccaaggcatctgtgctagtcaggcagcacaccatcctcagagatctcagtcccagaatccagaaaatccctccttcaagcacctgaggcacagccaaggtgggcagtatgattttcaggggtggtggtgggttcctccaagctaataaattataataatcttggcctatgtcttttttgtttttgtttttcagtccatggggcagataggtttggctctgtgtccccacccaaatctcatctccaattgtaatcccgacatgttcagggaggaacctggtgggaggtgattgaattaagggggcagttttccccatacttttcttgagatagtgagtgagttctcatgaaatctgatgatttaaaagtgtttggcagttccccctttgctctctctctctcctgctccaccatggtaaaatgtaccttgcttccccttcaccttctgccatgattgcaaatttcctgaggcctccccagccatgtggaactgtaagtcaattaaaattccccctttttataaattacccagtctcggctagttctttatagcatcatgaaaacagactaataccgggtgctttctgtctccttttactatttctcctgatacctgtttcctgtttgccttttcacttctccaaaacctggttaacaaattttagataactagtgaaggttctttttcctgatgaatacagaaattcatacagtatcaatagtggtcctaggaaacagacctccagatagtgatttggggattgatttatgtctttgggcatgaacatagtgatgagattcttgcctaagaacaatgtggtgcgagtagtttttggcatgtagtggcatcaaattagtcaaattattacctatggttgataacgatgtatctggatgaacagctggctacttcatttgaccattatgacagtaacactaacaacaagaattgtaggatgacatcgattcaattgaatgttttagagtacaatacttagaatatgacaatttcaggtctacaaattttgagctgaagtcactgttggagaaccagagaccttctatggcatctctaaaacaatcttttatttcttgaagcaacacagtcaatttcacagaaaaacagacaagtaatttaattgtgttgattgcagctttacaatgtatattgaattatcttgcaaaatgtcccttgtgaaagttagggtatggtcaggataggaacgtaaccatgtgccagccaaggctcaatcaaagaaaaagaacaagtgacaaaaaagaattggctgatgtgattatggggatttgattgcaagtccaaaattcacagggcaggctgtcaggaagaagaggccagaactcttggttagaagatgcaattcacagtgaaatttctcgttcttctgggaatctcagttctgctcttcaggccttttcattgattaaatcatgaccacccaggttatctaggaaagtctttacagaatgtcaactgattatgaacttacataatatctacaaaataccttcacataatacctagatttgtatttgattttataactaggaacaatatcttagccaactaagcacttaaaactcaccatcatagactctgagattggatatgcggatttctagatttccacataaaaaatgaggacttgaaccctggagttaccctgagtctctttgccagttaagcacccaccttcccctgtctgaagacactcccctcctacttacaagaaaacaaacaaacaaacaaactgtaataaacccacctgaggcagttgccttgtaagggcatacctatttttctcaagatacatcctaagcaccccttattacttgtagatcatcaactgtggtcagctgtgatcatgttccaggggaagtctaaccctaaaggaaatagtttatactccacaagaatcataagactttttctaatttatcttatcagaaatttgggaattatgtgtgaaagaaaatagaacttctggtccccaaatttaccatgccaaagggaaagttcagcttgggaaatgaattatgcaaaaactgctttcctttttttttcccaaatagttagttgtaatttcacaattctgtgtcatagcctcattttctctactctctgtttttacatgttactttatcttatgtaaaatgtagatttactgaacacaggacaatgtataattgactttcctcaactgtctcattttacacgtaaaatgtaaagtcactgaagctaatcagagcctcacaggaatgtgagcatctgccatactgcctccttttcctcctttgttttcttccttcttcctctttcccctttaatgactgaagttcccaaaaactccatttgaaaaaaagcacaggtcacagatgctcctgtgatttgtatttttcccaggtgcaccctcaaccttagttaaataaacctctgtagattgagatctgcctcaatcattttttggtttacatatgtgtgtgaatggactctggaagtgtttgattcagaaagatagaatttatcatttgctggattgagatggatatattgatatgggtatacagcaaaaattctaaatgtggtatattggctcaggaagtttgatgtgcacctgtcaatttacttggttgtttgactgaaacttggatgcagtttcacctacattcagtaggtctcagacactagatctttcctgggataaggtagaaacaggaatacaatgactttctaaaatagaaatattagagtgaatttatcacacgtagtttatataacaccaaccctccttcctcccaccccaccaactctatccactgataagacactttttctcagtactgtgttaagtaacacattaatgagggcagcactagcatctttgaacagctttgcggtggatttcttctttagcctaggtatgaaagtgggaggtgctgccattgaaataggctctctggtttcagaggtggttccagaggagcctaccactcaaatctcacttcaaaagaaaatctatttgaggagtgtggttagtctccacttccacactttgggaatccactgcagatgtcacaccaaggacacaatctttgcactttcttcccagccaatgacaaagcaaagtgctctgatattagaaagtagctatttctgcattatgtggaactcctctaatgagtaatcttttcactggctctacccattaccctggccaaattttctcagagctgctaaaaatatagtctagggctctacttactaattcttgttccttctacctatcctaccgcagagtctgaaagctatctctgcctactctggctacctgattcttcatgtttcacaggtgttttcctcaacaaatctctagcactctaattatatgttggcttctacttcctaaagacttaaactgatgcatatagggggaaaaatgatcccagattggcagagggtagtagcagtgcttccctagcagagaccttgcaggatgatttatcataataggcatcacaaataaagcaacgatgacagagattggtggtagttaattggttacaatattcctcagaattcaatgcacaggcaatctactaacatagtaatgggaaacctcgaatttgagtgagtgttcaaaatcttgacttcagacaagctcaatggttactcactgtctttcaccaagttttcagatctaagccacttcatagccctgcagccctttggctacagaggaggccaggttatattaaataaacttcctgaaagagattaataagcatatgtcataaattttctttcaatcctctactgaaatatcctaggatcatttactgttgtgattattcactgaggcaaggaaaaaacctacatttttcaaggatttctagaaagtttgtctggatgaatgaacatttctggggatgctaagactgtggtggtacattagtcaaagtaggcatttatggcggccagatgataaatcaaatttaggaccaagattgaacaaccataggtctcttaagtctgagaatacattttatgtttatttctctaattcctgagtgtacaattagaatagatttactcagcaatatgcagaatttctaaataattttcttacctgtagtgatagaatgagccaatggaaattctgggaacttccgttccctaccaagatagtgtgtcaaaagtgatgatgtatttggagagaaaagcagagattcgttcaccatcaaagacttaaaagatgaaaagatagtgatgccgataatattcccatttaattcaccggtttgatacagatatattaaaagtgtttgttatcacaagacaaaattaccactcagtccagctttataaaccactgccataaataattcattcaaagaaacaaattatagttgaaaatgtctgagaaaaatgttgctttcctttcatagagcaatggtcataaactaacaataagttataactaataaattgccaaataccaaggtaaaaagaaaacaacaaaaattttcaatgatttaagaaccaaaagtaatccctttataatatttgaccactcccacaatttagtacaacttttgggggtataataggaaatactatcaaaagtcttgtaaactgaaaataaaattctaagaccccatccaacagaacaaacaattcctttctgccgagggcattccaaagcaaacctgaaaaagtctagttcaagccatgatgtgaatgggggagtggaagtggggggatcaggaatgcctcattataactgccccccgcccttggaattcagatacagttgaccatcattaacattaaaacataggtcttaagactgataagactggccgagtgtggtggcttatgcctgtaatcccagcactttgggaggctgagacaggtggagcacgaggtcaggagatcaagaccatcctggctaacatggtgaactgttgtctctattaaaaatacaaaaaaattagccagacgtggtggcaggcgcctgtagtcccagctactcaggaggctgaggcaggagaatggcatgaacctggaaggtggagcttgcagtgagctgagatcgcaccactgcactccagactgggtgacagagcgagactcttgcctcaaaaaaaaaaaaaaaaaaaaaaaaaagcctgataagatgataagacagactctttgcagcagtaagacaccaatttccagcctgccttgattgtaacatcacatgacaacaggtcccgaaagaaaatgaagtatttaacccaaaaacatatttatttgacatttgagatggccctgcaaagctgactcttgtggggaaaatctatatactgtagagaatttccttccctttccaggtctttttcctgatccagaagaatattaactgagtctggcattattttagatctgataagaattctgaagcctgctacttggagcttcatcgcgtgataaaacctctgtctccacaataccttatcttaacccagacacttccttctgttgattccaggtctttaggtaagagcataatagcgtaactctttcaaccaattgctaatccgaaagtctttgagcctatctatgagctggaaaacccccaccctcccaccatgagcaactcggattcaagtgtttctgcctttctggagtgaactaatgtatctcttacatgtattgattgatgtcttatatctccctgaaatatataaaaccaatctgtcgcctaaccaccttgggcatcatgttgtcatgatctgctgagactgtgtcacaggccattggtcactcatatttggctgagaataaaaatccctggaaatattttccaaagtttgactcttcatcaatagtcttaatatgattttacagagaaataccactgtgaaaatttatttaaaactatcatcagagtttcacctggaaacagttggttcaacgaaggtattcaaatggtatttataaaagcaagaaacttgaaactgtgaacccaaaatatctgagacaggtctcagtcaatttagaaagtttattttgccaaggttaaaagtgcgtctgtgacatagcctcaggaagtcctgatgaaatgtgtccaaggtggttggggtacacattttagggaaacatgaaaaatcaatcaatatgtgtaagatgtacattggttggttcagtaagttgggacaactcgaagttggcgcttccagattagaagtagataagagacaaaaggttgcattcttttgagtccttgattagccttccactgaagacacaatttagtctggctcactgaatctaaacttgtacataaacaatagggcagaggaagcaagcagatatgcatttgtttcaggtgagcctcagagggctgactgagttctgtctgtcctttgtccacaaggagattccctgtgggcaaattgtgacaaaggtatgtaccttcttatctttgtagctatcttatttacaagtaaactggtaagcaggtttgactaacctgcttaacctcccaggttaactcccaggttaacttttatcttgcatcagtgattttggagtcccaagacttattttctttcacaaaacaatataaatgttcaaaaataagatattggccatttctatataactataggtcaactaatggccaaattattttaaaaatgcttagataagtgagaaaatattcacgatattctattaagtgaaaaacatgcagcaaaccaagtatatgtgacatatatgtgtatgggggagtaacataagttttgactgcaaaagtttcctgcgttgctttgttgccttttatttgtatgtcggtatgatttctctataggtatttatatttttatataatatgagagagagatataaagacaaagcagaatctcttcaatggttgcctgagaggaattgggtagatatttgtaaactatatcatggtgggcaaatttttccctaaggggcatgataataaatagtttaggctttattggacaaatggcaaaatctaacatattatgtaagtatttatataatcatttaatataaaactattgtcaaatataaaagacattctcaggtcacaggtagtacaatatctggagacttgctgagggtagtttatcatacctgttctacaacagaaaagtaaagttaatacaaaaatttattgtttacaacagcataattaagtgagcaaattatgtacaatttgacattatttattatattttattatccaaatatattttcattggtttctataatttttgctttgttcatttcaaaattcctagaacttaacatagtattatgtgcatagaaagttctcaataaattgagtgagtcaattaatcaattagtcagtgataaaataggactctcagttctctctttgaactgtcacaggtatagctttttttggttgcaaaagtaccaccacttcacaaataaccacttcctaacaaaaaaaaaatacacagaaaaagcatctgtggatgcccaaatatcacaaatttgatgtttcacattattaaaaactacacaaaaatgcattttctgtgggtaaaatctacactcaaaattatttcttgggaaaagagtacacttcagtcagatgaacaaaaatgcttggaatatattgaattcaaaggtttctgcccttttagtggcctttacttaaaataaatatttccaatttattaaaaaataaatctaaggtcatacaaatatgaccttagattgtaatttgaaaaatgtgtcccatggcaatgtgttcataaatataaaagctataaattctattaaacaaacatcatgtaatgaaatacatcttttgaagtaacatacatatacaaaaatacacacacatgcttttttctgagctatttaaaaagtataaagattctatgtaattctaccaaaataacataaaagataaattataaagataaatataatataaatatttaatctgaaaatttaactattattctcagggtttcttttcaataaatttttaaaataatagtttcctatttataacccttctatagtttgaatgtatcccccagtaagaatagtttgaaagcttaatccccaatataacagcgttaggaggtggggccatgaggtgattagtccatgagggctccattctcactaatagattaatgcctttatgggggagtggattcgtggtaaaagcgagagtttggtccctctttccccacctccctctttccttctctttcatttcttccttctgccacaggataatgcagtttaaagggcttcaccacatgctgtcgccttgatcttggacttcccagcctccagaaacaggtgccagtaaatatctcttcatcgtaaattatccaatctgtggtattctgttatagctgttcaaacagtccaagacaaaccccattcatttcaaagcacctagaaaaactttctagtaaattaattcataaatctataattttatatactatcttcaagaataaaaccaaacatcaataaggtttctagaaaaacagaaaataatttgccctagttatgtttgatttattgtaccagttgctatccatataaagtttaacctctttatgaaaatgaaaattctcaactgtagtcatggaatcttcaccactgacacacaatttaagctgtgaagctttgtataataagaaaaggccctagagatgaaattcacataatacttcaagttatttcagaagacttatgttttaccaaagggagaaaaacatggccaaaaaataatccttaatagtagttgaagtaaattactacagtgcaaaagagaacacttttggtgcttgattctgactctaatgcccacagggatttccaagaacggggaagaaaattatgttgagaaaaggaattttccttttcaaaggaaattctttgacaaattccatgagcaaagaagaaaaaaataacagttggagcacggtctttattatgtcactataccctaatcattattccttcaatctgttcttttcttttttttcctactattcatggcctagtaaccccagtttcttttaaaaacagaagttgaattcttaccagttccacaagaagaaggtattcaaataagagaactgtagtctgcaaaaccaacaataaatatctgaaatcaaggaactcgcactctggtaaatactttgttgttgttgttgttgttgttgttttgatttttgagatggagtctccctctgtcgcccaggctggagtgcagtgaagcgggctcagctcactgaaagctctgcctccggggttcacactgttctcctggctcagcctcccgagtagctgggactacaggcgcccgccaccacactcggctaatttttttgtattttttttagtggacacggggtttcaccgtgttagccaggatggtcttgatctcctgactttgtgatccacccgcctcggccccccaaagtgctgggattacaggcgtgagccaccgcgcccggccgtaaatacgtatttttaacagtaaattagaaggcatgtcagaggtgtgatggggaaaatttgatgtcaataaaagcatatgaagtttatcgccaacagggttgacatttaaatgtaattagcatgggacaccttattgagaagtgacatttgggacaagcaattgaggtttaaagacattccaggaaacgggaacagccagtgtaaagaccctgagaaagaaacgtgtgctttccaggcgcagcaaggaagccagtgaagccagaacaaaatgaacaaggggaagaatattagcatatgaggccagcagcgtagcaaagttcagatcgtgtagactgttcatctgagtctactttgtgttgctatgaatgaatacctgaggctgggtaatttacaaagaaaaaagatttgctttagctcatggatctacagactataaaagaagcatagtgccagcgtttacttctggtgaagacttcaagaagctttccaccacagcagaaagcaagtgtggaacaggcatgtcacactgtgagagagggagcaagagagaggtggtacgggagctgccacgctctttttaacaaccagttcttacaggaattaatagagtgagaactcgcccatgacttcaaagatggcaccaagtcatgcatgagatatctgcctccatgacccaaacacctcccattagaccctgcccccaaccgagaggattacatttcaacatgggatttggaggggcacacatccgaactatatcacagtctgaagagctcttattaacaacaacaaaccagaacattatccttaaagtgccaaacagaaaactactattctatatctatccaatgttgagaaataattttctttaagactcaaattgctgcatatatgcttactacccttttaagaatgtgtatagagaacagtcttgaaaagatatagtgtctttttttccaatatctatttatgtatatgtatgtgtgtgtgaaatatatatattcatatatacatatatctctataagataatcaaaaggcagccagtgtcatcattttattgacataatctatgttcaaaattataaattaaaaaattattattatgaatgaataggattatatattaacgataaaaaggacaattctctaggaagatctaataatcatgtttgttcttaaatgaacttgttataaaataatacataaatatatttgaataaaatatatatttgaatgaaagtaaaatttctacatattaatatatgtgtgctacttaatgccaatattagaagtcatgatcctttgtatattaatgaattaagtattcaaataatagtcttctatttaagtattattagaatgtttttcctaataatagtcaatagtgtttctgtatttaaataatagaggaaaaacaacacagtaaatccaaataatgccaaaaacagaaataatgcaatgtggaatagaaattaaggattataaaataaaataacaacagagattaataataacttaaaggtgggtttttcgggcaaaactattaaggtaggtaaactgatgaactcatgagaaaaagacagcgggttaaattagtagtaagaagaatttaaaaagtgatcaaaatgaaattgaaaagcaaacttctagagctttccacctggggcctggaaattagtgttctttgtattctcccatcttctgttatctaaaataccacttactgcatagtacgcactcaacaaatatttattgaataaataatttaatcaatgattaaatgagtgaattaagcaagaatgtttttaaagaagcacacttaatagaaacactgtttgcttctacacttattaatagatttttttttttttttagagggagtcttgctctgttgcccaggctggagtgcagtggtgcaatcccggctcactgcaacctctgcctcccgggttcaagcgattctcctacctcagcctctccagtaggtgggaatataggcatgtgccaccatgcccggataatttttgtgtttttagtagagacaaggtttcactgtgtttgtcaggatggtcttgatctcccgacctcgtgatctgcccgtcttggcctcccaaagtgctaggattacaggagtgagccactgtgcccggccttcatagatttaaattttattatttttcccatgccacattgaattacaatgctagaaagaaaggaaaatataagcaagaaataagccatgttaaagttgctaatctttttttttcagttcctcatgtttaatgttctctcctttttttttcttgtttatgtagacaccgcaggcaactctcatttctgttcttattaccctttttgtttatcccaacttttctggatatatcactgtggatattatgttctgctttaaaaaatgtggaataggccgggcgcggtggctcacgcctgtaatcccagcactttgggaggccgaggcgggcggatcacgaggtcaggagatcgagaccatcccggctaaaacggtgaaaccccgtctctactaaaaatacaaaaaattagccgggcgtactggcgggcgcctgtagtcccagctactcgggaggctgaggcaggagaatggcgtgaacccgggaggcggagcttgcagtgagccgagatcccgccactgcactccagcctgggcgacagagcgagactccgtctcaaaaaaaaaaaaaaaaaaaatgtggaatatctccttcttacggatccttttaaatacatgattatgtcttatcataacagtaaattttcgtttaaaaatattaatttattccctcattagatcaagagtttccaaagctgggcctctttatcactataataaacaacacctggggatttgttgaaaatgcaaattcctaatcttatcccagtcctactgattcaaaaactctgaggtggatcccataaatccttttttatcaagactgcaaataattttgatgcatccttaagtgttagaattactgtgacagttctttatgatagaaacaatggtagcaatgaaaatcataagcttctgcatcagatgggcatgagtttgagctcatatctaaagggtagatagtagttctgtaacattaaggagctgatgtaacctcagcaagcctcattgtctcatctgcagaatgggcatggcaatgcaaaacacaaagagctgttgtgagggatcaagataatgtcagtaaattgcatggttgaatgcactgtagttatttatctaacaagcacttactgagcacaaactattcaccaaatggctgattggtgattgggtttagaaaggtagaatttcaattcccaagttatctaggtttgacaatattgggacagaatgatgggatccaccattggggagcattaactcattctgagtccagaggaggtcctgtctctgagtgctgtctcagtgcagagggagaggaaggagtaggcagatagcaggaagcagagctctgagtaatatcgcgctgctctggaacatctgtttctcctcacctgtgtagaacagtagcaaagaaaaggaaaagaagaaagaagtagagtattgattgttgaagccactaatccatgtcctaacaagggagtggcataagatgtctctgaaagtgacaaagacctcaaaccccagaaaccttggaagcactggtcacaagatcagcaaagagaattttcttactggaggcctctagacctgttcttccctctatgcatatgagcacatgcacgtgcacacacagacacacacacacacaataaaggagagaaagcacaacaggctacctagttgctctatatttaaaaaattactatctttaattttttaatgaaatgttttaaatttaaattaaagataatatctgtctcaggacagtatagtaagtctgttgttcctggatttggctctttgttggtgaaaataaatcttgtattccagcctcaaatttgtactccaatgaatgggattttttccactacccatttcctttgtactagtgttttgcccttgtgcccaggtaccctaacttctaagcagatcgtatttgccttgcttctttcttagaatatgagttttctgccttatgctctagtccagtggtttgcaactgggactaattttccccccggaggatatttggcaaagttgggtgttattattgttgccagaactcaaggatactaatggcttctactgagtagagtccagaaatgcttctaaacatcttacaatgcagagcacaaccctctacaacaaagcattacggttgagaaacccttccctagttctgtgatgtgtggttttcctgtcctcaaactcctctcctgttatgctactgacagctacactaggcttcctggaagcttcctgcaggtctactgtaatgttggcatgtacttttctgtcactttgactcccaatgggtgagcatatttgacttggttggcaatgttatgaagctacattctgatgttctctctttctctctctaatcttcatgacctgctgtcctggattagcatcaaatctctgggctcagatccccacatgtagacccaagacccaacttattcatctagattcaggctttattcacatctgtgagttcccttggttagcccactaaccttaaactaaatgcatcccaagcttgatgttatgaaatatgatgcattggcctcagaaaattgttagaccttttagtgaagatcagatataatgatactagaaaagaaaatgataccctctagtctttattagcatatgtagtccttccaaacaagacatatcacttctaggtgctttgcaactgtccagttgttttgtacaatattctacacaatttgtttactatggtctcaaaccaattgacttgaagacaccagtaggcatactatgactatcctgacttcattaattcatatttgaatcagatagaacatttatactgaattaataacaccaaaatctcagtgatttagaacaacaaaggtatccttgctccttgcaaagatgccattgtgctttacaaaatgctcaaattcccatgctgaaggaggcatcaacccatgcattagtaatttacaggacagaaaaggggacataccaagtcatgaacttacttttaatgctatcaatcttgaagtgacatcatgtgtgagtttacaaggccaacaccaaagttcagtcattgctaggagaactcacaggactcagcatatactcacatgtgagtcacaggactcacatgggcatgatttattacaataaaaagatacaaagcaaaatcaacaaaggaaaaagtgcatgggtcaaaacccagaggaaaactatgcacaaacttccacaagtcctctcccaggacagtcacacaggatgtgcttaatttcttaatcaataagtttgtgataggcatgaattattttctactaaaaaaactcctagcagggtggaaaacaactctttcttatgtctaagttctgaaccagaaatagttggtgaaaaacactatgatattggttattattttactgtggagtaaaacaaaattaaatagacataattaaatttgatcttacatagtaagtaaatatgcatagttatgttttcacaatttagacaaaaaaggcctataatccttacatttttcacattatctcctaagataattttttgaggtttttttgttttgatttttctgcaatgtctacctctcaagatttcagccggaattaaattatctatggaaatggtaattttttctacccatcaatattattttccttgagaagtcagagataaatgccatctggacatagcattttatcattagatgttttactttcttgatcatctgttctgccaagatacagtttttcttcagtgtttatttttcctacctgagaactgtttattgctggcatttgttcctcttcctttctctgttaacacagaagcaagaagagctttggatgttttggcaatgtgtccatctgccatgtatccatcaccgttgccatattttgtagctaggatctctgcaaagcagtgaggcacagagcaatacactgactggagctgggttcaaaccaaaaagtcctgctctgtattggggaaaatggtgcagtgattgacatctggacctgctttgacaggctcttctctgcaaatgaaagtcttagaatggacaaatttgctgctgacatgtgcactccagttcacctttaagtatggtgagacttgacattgcttgagctttcttgttcaggctcagtcttggtttccatttttacatatgcagggcttatcatgtttagattttcacttcattgcacacttgcctcatttcagatatctttcttcctgcctcttgtaaaaatgttgaaattctcatttgtgctgttaacattttctcatttggaaatttgtcacttccagtccagcattttcctaccattacataaagagatggtgatcactggctttgtgatttctttaatataatttattgtatcatacttttccttttgtcttgtgtctttcttccaacattatttggtttcccatttctcatcagagcaaaacacgattcttttaatttttagctccttttaaaaagatgcatttaaactaatttgtgagaaatttgaaaatgattcacaatataaaatacattaattctgatttataaaataatctagtgtttgttcattgctgtgtatccaaatcaatttttgtatatttatgcacacacatatatgtgtgcaagtttgtgtgtgcatgcacatatatcttgtatatttgtgtatttctatatctgttttgccccttcattagaaagtgttcattgtaaacaaagcccccatcacagctcattctactctgaccttcatgacttagttaaaacactgaatgttgaaggaaaccgtgcccccaactcgactgcctgcaaactggattacttctgttgttgcaagaactcatgaaaatgtccttcctcaagtaagtctttttgaactgatttgtaaagagcttactgcctcactacataattctgagtttgagtataaaacttgcatacaatattttcttgatttctgtttgcaaaaattgatttagccatgcagtataagcttaatcagctcttacgctggacctatactcagggtaaatacaccaatacttatttcactgtaatgataactgcttaatcaaatatttacttattgtgcaaattgtttcacatctgagttttatgcttttaaatgaggttttgaagattctccaagaaaactggcaatgcagtttttatctggagttgccaagggtgttactaaggaaataagaagttagctaagagaccctttcaaaatgaaaagcaattttaaatcaaatacgctaagtataaaaaagttgcttcttgggaagaaaaaaatgagcaaagtttcaaagatagcatgaagcaggaaaaccttttaaaacgaaagaaattaagttagtaagaccctatgttccaaagtagtggggtattttttttatcttccctcatgaagagaaaaagcagagaaatattagaacaagagaattgaaagaaaatgtcaagtctctttcctatctccttaattagtttttcttgctacctggactcgtaaacatttggtaaggtagaaaaaagacaattttaatgaagcagaacaacatccagagagcggactctgacactgagcacaccaagcaaaatcaaaaagttaggaagataattgagtctagtattttaacctaaaaatgaggactttaaaactaaacgataagagagagaacaattttttaagaagaaatatctcaacatttctttttgaaactttgatttgtttttattttttattttttttagacggagtctcgctctgtcaccaggctggggtacagtggcgtgatcttggctcactgcaacctccgcctcccgggttcaagtgattctcctgcctcagtctcccaggtagctgggattacaggtgtgcgccaccatgcccagctaatttttgtatttttagtagagacggggtttcaccatgttggccaggttgatctcgaactcctgacctcgtgatccacctgcctcggcctcccaaagtgctgggattacaggcgtgagtcaccatgtcctgtgaaactttaattttaaaggcttgtttggctaaagataaaatttacctgtttaaaattagggttttttaaaatatatatatatatatgtatatacatatacatacacatatacgtatacatatagttataatttattaactcaagccaagaagaaacctcgggaagccagtgaagaaaaattgtttttcatactgtgtggtcatgtcaaacaagacaatggagggagagaaggaggagaatgtcaggaattgaatatatagaacttgtcatgaagtgatggcacttatgtcactaaaatagagtcatggctaagtaagaaaatatagctgaagaaagtgtcatttatttattttttatttagaaaattatatatatatgtcaacatcactgcattttgattaatgataattaaagtgttatattatttttagacattgtataaaagacatttactggacagtgtcttaataaatcctcacaacaaccttatgaagcatttatttttatttttactcatttttatttttattttgccactttacagatgaggtgatcaggcttagagagtttaaataacttgctcaaaatcacatggtcaattaaagcaacttttcaaaaccaaggagcctgaatctactaatttacccattatgttcttctacattttggtttgacatgtgagctcctgtagggaagaaaaataacagcaatattaatacaagataattaagctaaaaaatgtatttttggatcaaagatagcatatacaatagagtggtaacttaaatttttcaaaaagaaaactttatgctttactaagaaaatttaagaggaattctgtggatttccactacacgcctacttacgtgccagcatctatactcacacattctattgataaaactacccatgcttcagtataaaaccacttcctctgttagacaccaggtagtattctatttctcaaggttaccgtactagtaatttttcattttctcttttgcatcctcatttttcttctctattagaacattctcacaatcataaaatatactatttttctgtctcaccatttaaaagcaaaacaaaacaaaacaaaacaaaacaaacagctatcttcaccccaccacctatccagctatttcctcaactctctttcttccctttgcaacgatatgcctagacaaagttgtctatcatagcttttattcctctatttcaaacctcccttctataccccccaaacaggtgtttcctttcaccattatgaccaaaaatattctcaaaaagccacaatgacttcctcaaaaatcaaaccactatttgcaatcatattgcattgctatcaaaatacataacacctactaaatcgtgatattcaacataaactatctaagctcaaattgttttccaaacagctgactccctgttaactcaacatcaacttaccccttcatcaggggtgaggtgtcttgttcacggtgcctagaacatggcctgatacatagtacgtgctcaaaaaatatttactgaatatatgcatgaatgaatacatgtgcaattaaatgaatgaataatacatgagcaaatgtgtgacctaaagtagcccagtggattgtcattttaaaaatgtactggcaaacctatgtcaagccacaaaatgatttaatatgtcacaactcatttaacctctggttatgttctacggaagtcagtactgaaggaaagattattaatgagatcaataaacagtgtttctgtggggtaggtgtccattcataaattttgtatttccataaacagtgtttccgtggggtagatattcaatcataatttttatatttcacgtgcctttcacggtgcttgttaaagctcaataatgtttgcgaagtgacaaaatgaataaataccatttcaatactgcaatgaaaataaagatacaagtacatgtaataactttgaaagtgtttactcctgtaacacacttgttttcctgtgcaacaccgttatatttcagctccaggtgtacagtgaatcggtgtagaaatctactctctaaaagagatgcaatacatgcctaggaaactaaagtgcattttttctatacggtagtcccccttattcctggttttgctttccaaggtttcagctagctgcagtcaacggcaccccaaaaatattaatggaaaattccagaaatagaaaattcctaagttttaaattgggtgctgttctgagtagtgagataaaatctagtgttgccctgctccaccccattcgggatattaatcatctctttgtccagcagatccaagctgtctatgctactggctcattagtcacttaggagccatctccattattagattgactgtcacacgttctgtagtgagtgtgttcgcgtcccttattttatgtaataatgacccaaagcacagaagtagtgattctggcaattcagagatgccaaatagaagccataaagtgcttcctttatgtgaaggttcttgacttaataaggaaagacaaaaatgtctattgaggttgctgagatccatagtaagaatggatcttctatttgtgaaattgtaaagaagggaaaatacgtgtgctacattttctgttgtatcttcaaactgcaaaaaatccaaccatagtgtgtgattactttaattactgtgtattgtcatgatttttctattttaatcttagttattatttttaatctcttactgtgcctaattaattaaactttgtcatagctgatgtatgtataggaaaaaacagtatatgtaggattggtactattctcagttttaagcatacacaggtggtcttttgaaagtatacctctcctgtaaaagggaactacaaacgtgcaacgttcctcttagagaaaaatgaactttccggggaataatgtacggacacagacacaatttaggaagcagctaaaatcaaactgcatgcagtttacatggtaaagaaagattgctgatgggattgggagtctcacacctttaggccaactgtgtttaattaaactgatgttcttggcaagagaaaggaatattagtaagaaaccccattgggaggtgtagtggctgcagtgccccaggaattcactaataaatagtacacatgcactgacaagataaggacaaatgagagtggctctgacaacctaattatgtatttttgtagactgggcattgcagagttcagccgttcagaggaatgtgtggtagaacatattgtgaacacagaggcatgatagggccaagcctgaacgatgtggagcacagaaggccctggaataccaggccccacaaccaatgctgagctcatcacccaagaaagcaataaattaatcatgtccaaagtacactgtgtttctgtttttatgtgtgaaaatgagaaacttgggaataaaagtaaattttttgacatactgatctcctgaaagcaattctttttgacattttaaagatccttattttcagaagctattctgtttgaaatctgagattctaagacgtcaaaggtatacttttaatagtttcacttgctattatactgttacttaattgaaaaaatctgttgttatttaatatctttcacattcttgttttctctgtagcttttaaacgtaaaacttttttcctggatcatgcaagtttaaaattcaaatatcattacttatattcaaggcattattaaaatgaaacatatatttaaatatttcatgcaaaactgaaaactttgtaaagttttttccttaaaatgtgtttcatcatatatatttatcatgttatagtagtttaaaatggatgaggtttgtttccccagttttaccttttatttttccaaaaaaggttaatgtgctattataaaaataaaacaatttttggctttgtctgccatgagtaataggacctgctgaattaaattttatctttgccccaggcacattgtgaatttaaagtctttgcaatttctcatttttcttttcaagtcagaaatgggcttgaagtttcataagaatttcaaactcagatgaaaactgtcacaccagcacctgcagcagctttatgcaccatgaaggattaatcttgtgaaataatcttacaagtaacttttacctgtctgatatttaagacctcactatttaagaagatacacaaaaaatctaaatgcagtttccttaacattactatccattatagatagaaatcctgtaacaagttgagtcattatctgagaggaatcatagtatatctatctatttagtatattaattttagaaaagcttttattgtaaatattttaagagttgttttttgagaattgtagctaagccatttaaaatagaaatatttaacatgtaaatgttaccattagattatcgttctatatagaatgtttttaagaactgagattttgaaaaccttagagatatataagttgataatacagaagtgggtcaatgatatgtatacaaagtaataaatatagatttaagcaaagaaaatgtattggttaacaggaatatcatagcaccagtaattaaaaatatagagagtaacaatggataatcatttatctatctacttatgtgttcctcccttttcccacaaaatttagaaaaattttacagattattctagtaaagatataataaaaataatgcactgcaagaaaacagataggctttttaaaataaataaacttgctattatgtcaagtgcataaaagtaagagatattgtagtttctctaagaatataattttgctaaaataaaataagcaggcacaaacaaatatatgagcaaaaaccagaagttttattaggagtagaaacattaaatggtcacaatagttagtgaattgtagaaatatgaattttttgccttgttttctatcttctgtatggttttttaaatactaaaaatgacaatttttaacatatatcgaaatatagaaaaagtctgcgatacgatattgactaaaaactatggtataatgttaagcttctaaaaatatctaaaatagataaaaatattgtaaataacataaagattataaagccaaaaataaattaattttattcttgctagaagtcacctaccaaacaaaaaattaccattgatgaatatgtaacttccataccttaagattttgtatcctgaataaaaatttggtggcatagttacatttttttttttaatttactcattagaatcctcttgtatttgtagttttttttttttgtaccagagctatttgtccaaataagaactctttggttattatatgattccattagttatgtgccttttttgtgaaacatgtaataaaaacttgttcttgctacaatttctcctgtttagtaacatttctttagaaaaagcaaataatttatatgtaattaataaactactgcgttcaataatattaatttactaatatttgcgatggactccagcctaaaactgtatgttatttgttttttcataaaatttgaatagacttattatcaatttaaacccaaagtcatttaatgttttaaaaagaaaagcaaacttttttgtgcatttgctatgtgctagggactttgcaaccattctcttatttaattctaatttaatagccccctgagatgcaactatcatttaccccattttcttataaacactatctcagagaagtgcaacaatgtgcccaagagaggacaagatgtgcttgaaagatgtgaagctcaatttcaaatcggtctgaacctgaattaagagatttaatcactatactctataatgggtactaaccacacccccttgccctttatccttgttagtttactgcagtactttatacaaacctttcttcttgtttcttcttggtgtttttatgatgcagttaatccgttccctcattcaataaataccacacttatacagtacctaaagaaagcattctttcctttccttctccatgtaatagtcaccttgaacctgaatttatgcaaataactgcatatctaattaaaaaccagaatttttcctttcacccggctcaagattaattgattctgatttgaaagactgcagtatggcaaatgtttgtgttatgagaataaacaaagactacccaccgaagaacaaacaagtgaagctatttatttagaggttactgtaacaagggagtgggctaccattatctattaatattatccatgtttggcggagactcaaagactgacagacagtggaaaagctttttagtaatgcaaaaagaaaaagaggctatgtagagaccttgatggcaggttgttgtcatgggaaggactgggacaggttacctggacacatgtcatcttatggaattgattttatatttggctttctttttgttcatcctgattgaaagtgagaacaaatacagggaagttggcagcattgacttagtcctgaccatctgagctggttattacaaaggctgtcatttgactttctggattgattgctacagaagttgttttttggtttcctgggcatctaatgtgagtcatcagcgttatattaccataagtggtctggccattgtccctttgtatattcagtctttcggtggttattttccctacttttttctaacctttatcaacttggatttctcactctctagagatctagcactgggagagagacaacagcagaaaggggagcacagactttataaaggtaatgctggtagaatctgctgtcagtctcctcttggtatggcaggcacttgaagccaagtctttttctttaaacctttgatacgaagtgtagttgttgaaccagacacatcagccatcaccttggagtttgccatagcttaccgaatatcctgtattgcagcaagatacttaggtagtttgtaagcacagtaacatttaggaagcagtgctctagaatgcctttgtgagttttccctgggttttctcagtgacatgttccagttgcaattttcatgaggttgatggtccccctccactgactgctttctgttactcttcagtccacaggcttcattttgtgaatgtgtccattttatgcttggtcattttgtcccttaggttatgtcacttgcagtacctttcaggaaagctccaggctggattaatcaacgtgctgcacagaaaacacagactcttacttcattggtgaaagtgcacttctctctcgctctctctgtctctctcttcccccccacccccctctcactctctctctcatttctctttcagaccggccttaacacacacacccttggttatgaactgcatgttcgtggctctctcaaattcacaagttgagtccctaactcacaatgtgatagtatttgcaggtggggcctttgagaagtaattaggtttggatgatgtcataagaatggatccccccttaatagagtttgtgcccatattaaaagacaccctcagcaaactaacacaggaacagaaaaccaaacactgtatgttttcacttacaagtgggagctgaacaatgagacacatggacacagggaggggaacatcacacgggggcctgtcctgtcgggggtggtggtggcaagaaggagaacatcaggataaatagctaacgcacgcagggcttaacacctaggtgatgggtagataggtgcagcaaaccaccatggcacacattcacctatgtaacaaacctgctcatcctgtacatgtaactcggaacttaaaataaaataaaataattttttttttaaaaagaggccaaaccttaccttctctctaccatgtgaggatacagcaacatgtgagatatctttaacatctactaaaattcctggctcagatcaggtgcttaataagtatttctaaacaactaaaagattgactaaactaattatgtattataatatcaactagaataggcagtaaatgaacgtgagcttacatttgctgcgataaatttctaatttctgttgaggcatagccatttcagtatcacgttaagggagagagagaaaaagaatgctattacagatataacttttttctcaggattttttgaaaatcaagatgatgatttagctaaacttacacatgtatagatttttttcccctctgctgttattttgtttaagcaacaaaggcaacactcaaaatttaagaaggtttgtatgccttccagacatatactcgtaccttcacaagtacacaggcccacacactgtttaagtaaacactgaccactgacgatggggctaattgactttacataatgaaagaatcaatataatgtttgattttcctaaagttaatagtgtgttacttatgatcatcttagttcacttttacatggccatttagaattttaaacacagccatatatgccaggttttgcagaaaacctatctgttggtattaagaatggtaattgatttgttctagcagatttagcctttgatacagcattttcaaccattaaccatcaaataattcattatccactgtcaagttgtattaatgcttttcactggctctcttgaattgttccattaccaaaaagtaattgatagaactgcatacagctgtcctgtcatccatctgaactgacctaatcatgaccgtttatcacaaccagtgccaaataccttgaggatcttttcaaaatgatagcaatgggtgttcaacctttaatgttcagggattgtgcaagtctgtgtttgatcaagattgtaaacacctattgggaattgctatttgtagatggttgtaatattaaatatattaatattaaaaatgtgtgtgctcttgagccaaacatataaggagaaaacttatattgaatttatgtgctgtggagtccataagtcatttctttttaagggagtggtcaaatttttgttattattataattaacaattgtcatcaaggcaattgtcatcaaggcaaggtatcaagttcaagccccagctgagatctgagggtagtgggtagatgaggggtagggagtgggaagaacactgacgagacagcaggtagatgggacatggctttattcagcagctcactcacactgtgggtgtttgcatttatgcacctggcaaacaacagtggctacaagccaggtgatgagccctcccatactatggctacatagctgtgattatataatgcacagagttgtgtgcctggagtccaatctcgttgagtcacacaggatgtttatcttggcctatgcctgcctggctgcagtgcagccatgttccttacactccaccccctaggccaaggtagtcctctttgtggggacctgtgcacacagggcagtaccctggacccagaggccacagcaacaatacagagagcaacaacctactaccaatattcctactgtgctacctatgattatgagaacccaacataggccagagcccagagatgcccaccatctctgcagggggttgtcagtaaggcactcaaccaccttaatctcctgtgacatcccttgtaaatctgctgttgtgttctgctggttgtcagggatgaatgtacaacactgtatgcctacaagggaacatagtaacatcttgggcagctgttactatgtctaaggccatccagttttgcagcaccaccttcctgatctgatcaacctcatcggttaacaaaaggagggtaacttgggtgtaattcagggcccaagctgtgtgcactgcaagggctgtaacctgcatttctacatgaataacacctgctcctgggatagttattgctaaggggtagagccaccagagggcccgctgcacttacaaaaaccaggaacgtagcgccttccagttatgtggatgacaaggcgatgtggaaagcacagtggcaggcacatgggccacccccagcaacaatatccagtccagttggctggcagacatggccatcctgtgttcccaaatacccataaactcccagggggcacaaagtccattggggcttgggcttggtaaggagacacatattatgtttgcacaggctgcagcgggcaacaatcccacagtgacttcaccgcagtgttgctctatatatacatcatggtacctgcaatgagagtaccatgtgctctctcattagccagcaccacccatcatggacactataagtcagccgggggcaggcctgtcatgggttttgcaatgccccctatccaaagctcaccatgttgcattccaaccactgtctgtgggaccccaagtttctagccatgtctagtagttctttttagaagttggatgtacattccagggcaagccatccacagctgctgctggaagggcagtgcagatccaacagctggagacattggtcacctgggcataggtgtgggcccagtccacaatggtgttggagcatgtcaacctacggccggaaccgcaaaggaggcacaagtattaacaggggtaagtcatgtccctcaggcaaaatacgggccaaattttcatctctggaaaacaacgcagcctccaaggacttcttctgcgacagcttatcagatccctgtgtttttttagggtcttgtaactgtgccaaagtcacaggggagctcatgttagaccacacaggcagtacacatgtcccccggaggagggtcccttccctggctgttcccctatgaatggttaatcgtgaggaccacacattaaatacccaaggagtaacatgtaagtcatactgcaggccctcccctctgggggctatgtcagccaaccatcagcaatggggggcttggagggccaacaccaggttttctgttctgcatttgaggcattggggcaggcaacaacagattaccatttgtccccataactggtcggtggaagtcatccttggtttgtatctgtagctggatgggggcagcggcccagtgtcagtgcctccactgtagctgtgccacctttccatggctgctcattcaagttttggagcgccaggtccaacctggaactccagcaccacaaagactggggagtaagagtaacatgcaaaagtaaaccattcttcaggagtccactatatcgctcaatcatgccagcggcttgtgggttataaggaacgtggaacccccattgtatgtccatccgctgtgcccactgttgtacctgctgtccagtgaaatgtgttcccgtcactttcaatggccagggaatggctgtataaggcacctaagtgttacaagtctcgaatggtgtgttgctggtcagccaccctgctaaggtaagcaaacaacaggctggtggctgtgtctacagctgtcagtgcatgcgtgtagccctgtgattttggcagtggtccaatgtaatctatttgccatcttgtcaagggcatctgccctacactcacttgttgtgttacactgagcagtgtctccattacacttgagtgcatgacgggcacttctcgcaggcctcccaaaagtcccgcgagggcaaagacagaccccagcacctattgacctgccgcatcagcttatctcccacatgtctcagtttcctgtgtagccacaaggccgcatctcatgtagatgccgactctaaccaatggaccttgaccaagacatctgcctcatcattactggaggtggtcaaaggcatatgaccctacacatggtagacagttataaggtcttgccacatggtttgccccaaatgggccaatggcctacaagccaattctgtaacttccaggtagttaaccataaggttaagcctcaatagactgctcaactatcagtgcagtttaccataggcatctgctctttggtgatcaccatccacactgccctgagttcagcccattggcagcttggtccacacccagtatcaaaccatacatgtcaatactaggctggactgctgttgcattcaaggcagcagtagtgtcccagctggacccatctgtataacgtgccccatcaggaatggggggtgcccttccttaaacggtgatggctcagggtctaggagtgcctcaggccctgtggccttgtcttgcattaggactacaggcccagtgacctcttgtaactctgctgctaaaggacttatactctgtgaactttgctgctccaatttaggtgccccactttgctaaagtggatgtctatgccatcccagggttgggggtcattacccatgagcacaccccccccccccgctattgggtaagccatccataggatgaccatagcccatcccttcatgctcttggcttacaggcctgaagtgtggcatatgcagcagctaattgcttctctatcaatgaatatcggagctccgctcctttccacagctaggaccaaaaacctactggcattctaaagtgctctctgtgctgccataagccccagccaaaaccatctgtagtcacatgtacatcaagttcaaatgggcgtccctgatcaatcacttgtaaggcctgtgcttgctgaatagcccacttggctgacagaaagtctgtctcagcctcatcatcccactcccaggtagcccccttttttggtcaaccagtacaatggttttatcatttgagccaaatggggcatgaatggccaaaaggcctacaaaaagtctttaggtgtaggcacctcaaggggcctacaaaggactgcagctgtctcaccatggtgggttgggggtatgcctggattttattaatgatggcctctgttaaggccttcatcttacctgatcaaataactcctaagaatttggcagacaatccaggcccttggactctggatttgttgatggcacaactgcatactgccaaatgttgccacaagaggggcgccgccacttctaaatgtgcaagagaataagaggttaacataatatcatcaatataatggaacaggtggacctcttttggacatttccaggtggctaaatccatggccacaagaccatgataaacagtggggctatgtacatagccctgtggcagcacagtgaaagtccattgttgtccttcccatgtgaaggcaaattgttgctggctctctggagcaatgtcaatggaaaataatgcattagccaaatctacaacatagtggtactgttccagttccattgtcaagtggtccatcaaatccacaatggaaggtacagctgcacacagaaggggtgttactttattcagttccgaacaatccactgtcatctgtcaagtcccatcaggctttctgactggccataccagggaactgtaggggatattggtgttatgcactatttgcacctcccctaacttcttaataggttcagttacctccatatatccccctggcaaatggtattgacgagtggaggtaacctgtcagggttgtggcagaacttggggccggtgatatgtatgtccatgcagtaccggctttactacagggacttgagtctgaattctctgaccatggtgtacaagtccagaccatgcaaaatgtccatccccaatatacattcaggtacggaagagacatacacagtgtatggtggaggagccaagtggccaatgccaagatgcagagacacaggtttcaccatcactgactggcccacataaacatcaataaatgcagctctgcccagaaacttatctgggttcccataaaaaagattgcagtctgcaccagtatttaccagcgctaggacccatcgtacattagtggcagaccagtggattgccaactccacgtatggccttcagttgcctggttcccccgcaacccaggtaccttggccagtttcctaatcaaacaggaaaggcttcgtatctaagccagtctgcaaatagtccttgagctgaagcgtctgggtgggactgggttgagcaacattgttttgccccctcttgggtattttccagaattgttgctctggggacaattgcctccagagccaacagcattctgttgggatgtctgtcaattttcactggagcaacacagctgaaattaaatcagtccacatcttcatgcggttcacccactggagccctctcttatctcggggggtgggtacctgtagatggagcatcttcctcttctttatggcacaattccctggtcctgttgatggccttctgcctcctcgagggctaccatagtagtagtcacttcatatatgcgacaccccacatacggggtgaggacagcagccagagaggcaaaagcacttaggtgcacttagcccagaacaagattcctcatataagagacaaaacattcatcatctggcccccaggtattcagatcaaacatggcctgccatatacccagcccctggagtacctgcaccaaatcggtatgccactgccatctactgacagtttctggtatttcactgtcatcagccactcaatcagtgtggtcaccttgcccctgtgttcaccagctgtagctgctgaggaagggaggggtaagttgtaatagaaaccagcttctccacctcagaggtggagcaggaaatgctgtcagctccttcatccgaaagacgagtaaccaggcaggaaggggctcccccaaaagctgcccacattgcttgcctaactcccgcagctcagtgagggtataagcactataggaagtgtgttccaccacagtaggggggccctgagcccgctcctgaggtcccattggctgctcatgttctaccttctgacagatcacagggcgagcctgcagcggggagcctcctgctcctcagcattagactgaacggggcagttccctgcctggagaacaggctcaaggtcacagtgacggctgtctcactgtttcctgccatattgttatttgttttgtggttgtttcttctttctttcctttattctttgtttcctgttccaggctgcttttctgggcctctaaatgccctgtttgcacctggaggtccttacccacagtttttgctccaagctgtgcatttgagcccccaggcgcacagcttgcacctggaggtctcttaccggcgcagtgtcccttagggactgaacatgtactttctgcagtgcagtcagaaacgcttatctgactctgctggtgaaggcgaattccttctcgtgctgtgtgcttccagctgcttcagtgctttctccacacccacaagggacccatccacagcctcccacacttaccctggagcgcagtggagcatcactgccaacgggtaccttatgtgcatacatgacaggtttaatccatgttgttgcaaatgacaggatctcatttgattttatggctaagtagtactccattctgtataagtaccacattttctttaaccatttatctgttgattgacacttaggttgttcccaaatcttggctattgtgaatagtgctgcagtaaacatgagagtacgtacatctctttgatatatgaatctcatttcttttgtgtatataccaagcagtgggatttctaggccatatgttagctctagtttaaattttttgagaaacacccatactgtactctacagtagttgaactaacttaccttcccaccaataatgtacaaaggttcccttttctccacatcctcaccagcatttgttattgcttgacttttggataaaaggcattttaactggggtgagatgatatctcactgtaattttggtttgtatttctctgatgatcaatgatgttgagtacattttcatatacctttttgccacttttatgttttcttttgacaaatgtctattcagatcttctgcccatttttcaatcagattattagattatttcctattgagttgtttgtgacccttgtgtattctggttattaattccttgtcagatggatagtatacaaatattttctccctttctttgggttgtctcttcaccttgatgattgttttctttgctgtgaagaagctgtttaatttgatgtgacccaatttgtccatttttgctttgattgctcgtgcttgcttgatatagctcaagaaatatttgacctgtccaagggcctggagagtttcctcagtgtttcactgtagtagtttcacagtgtcagggcttaggtttaagtctttaatccattttgatttgactttgtatacggtgagagatgtgggcatgctttcattcttctgcatatagatatacagttttcccgacacgatttactgaagagactgtccttttcgcagcatatgttctagatgccattatgaaaaatgaattcactgtagatgtatggatttatttctgagttctctattctgtttcattggtctatgtgtctgtttttatgccagcactatgctttttttttttttttttttttttggttactatagctctatagtataatttgaagtcaggtaatgtgattcctccagttttgttgtttttgctgagaacaaactcagatcatttatggttccataaaaactgtaggattgtttttgtcaatttctatgaagcatgatgttgatattttgatagggatttaattgaatctgtagattgctttgggaagtatagaaattttaaaaatataaattcttccaatccatgaacatggaatatctttccattattttgttccctcttcaacttatttcatcaatgttgtatagttttcattatagagatttttcacttatttggttaatttctaggtattttattttttatttgtagtaattgtaaatgcaattgctttcttgatttctttctcagattatttgctgttggcatatagaaatgcttctaatttttgtacattgattttgtatcctgcaactatactgaatttgtttatcagttctaactgttttttagtggaatcttttagttttcccaagtgtaagaatatatcatcagcaaacaaagataatttgactgctttcattccaatttggatgacctttatttctttctcttgtctgattgctctagctaggacttccagtactatgttgaataccagtggtaaaagtgggcacccttatattgttccagttcttagagacaaggctttaagtttttcctcattcaatatgatactagctgtgggtctgtcatatatggcttttcttgtgttgaggtatattccttctatactcagtttttgagggtttttattatgaaaggatgttgaatttatcaaacagtttttcagcatcaatcaaaattgtcataaggtttttgtccttattctgttgatacgatgtatcacattgattgatttgcatatgttaaaccattcttgcatcccttggataaattgcacttggctatgaataatgatatttttaatgtgctactgaattttgtttgctagtattttcttgaaaatttttgcatcaatgttcatgagggagattgcctgtggttttctttttttgatgtctcattgtcagattttggcatcagggtaatactagcctctttgaatgtgttcagaagtattccttcctcatctattttttgaaatagtttgaataggattgttatttgttcttcttcaaatgtttgttaaaattcagcagtgaggccatcaggccccaggattttctttgatgggatactttttattatggcttcaatctcattacttgttattagtctgtttaggtcttaaatccttcatgtttcaattgtggtaaattgtatgtgtctatgaatttatctatttcttctacattttttaatttattggaatatagttgcttcatagtagcctttaatgattatttggatggttctagtgtctccttcttttatctctgaaattatttacttaggtcttctctctttttttcttagatagtctgggtaaaaatgtgctgattttgttttcttcaaaaaaccaagcttttgcttcattaatcttttgtatgtttttgtttcaatttcatttatttctgctcttatctctgttattcatttccttttactaaacttggatttaatttgttcttaactttctagatctttaagatgacgagttaggttgtttatttgagacatttttttaactttttatgttgtaggatttacagctataaacttttttcttagtagtgcttttgccttatcccataggttttggtatgttgtgttttcgttatcatttgtttcaataaatgtttaaatattctccttaatttcttcattaacccactcgcccttcaggagcatattgttaaatttccatgtgtttgtgtagtttccagagactcttttattactattttgtacttttatttcattgtgttcaattttattagaaaagatatctgataaaatttcaaatttttaagtttaaaaaaaattattttgtaacctgatatatggtctatccttgagaattatccatatgctgagtagaagaatgagtattccgaagccattggatcaaatgttctgtgagcatctattgggtccatttggtctacagtgcagattaggtctgatgtttctttgtgattttctgtctgaataatgtatccaatgctggaagtggtgtgttgaaatctccagctattgctgtgttgaggtctatgtctctccttttggctttaatagtatttgccttatatatctggctgctccaatgctgggtgcatatatagttacacttgtcataacctcttgctgaagtgaccccttgctcattatataataaacttctttgcctctgtttatagtttgtgtcttgagatctattttattagatacaagtacagctactcttgctatatctttttctatcgtgttactttttgcccctgtgtgtctttatggatgaagcgtgctttttccaggcaacagatcaccgggtcttggtgttttttttgtttattttaaatatctattcagatactctatgtcttttggttggagagtttagtccattattcagtgtcatttattgataagtaaggagttattcctgccatgttgttatttgttttgtggttgtttcttctttctttcctttattctttttctttctttgtttctttttctttttttttttttttggagacagagtctcgctctgtcacccatgctcaagtgcagtgatgcaatctcggctcactgcaaccttcgcgtcctgggttcaagcaattctgtgcctcagactcccaagtagctgggactacaggtgcacgccaccacatctggctaatttttgtatttttagtagagatggggtttcaccatcttggccaggctggtcttgaacccctgacctagtgatccacctgcctcggcctcccaaagtgctgggattacagttgtgagccattgcgctcggccctttccttcattcttatattccttttagtgatggtaattttctctggtgatatgatttagatttttgctttttattttttgtgtatgagttgtgtgattttggtgtgaagttaccataatgcttccaactattgatttacaacccattattttgaggtcataacaacactttttgcctaagcaaacaaacaagcaaaaagtaaactaataaatactctacaccttaactttgttcccctgctttttaacatttttgttgtttctatttaaatcttattatatcctctatgtcttgaaaagttgctgtagttcttatttttgatcacttcgtattttagtctttctattcaaggtgtgagtactttacacatcacaagtatagtgttatagtattctatgtttttctgtgtggagaaggggtaaccctcatatagatgttgggtatataaatttgtgcagcaacttgaagaacagcatggatgtttctcaaaaaattataactagagctaccatatggtccagaaatcccattgctaggtataatgtgctaaagaaaggaaattagcatatcaaaaagatgtatacattttcatgtttattgcagcactattcacaatagccaagatttggaaacaacctaagtgtccatcaacagatgaatggttaaaggaaatgtggtacatatactcaatggagtacattcagccataaaaaaaatgagatcctgtcatttgcaacaacaagaatggaagcataggacattatattaagtgaaagaaaccaacctccagaagacaatttttgcatattcttactcatttgtgggagctaaacattaaaacagttgaatttagatagaaaatagaatgctggttatcagacactgggaagagtaatttgttgggggaagtgcagttagttaatggatacaaagtagagttagatagaacaaataagatttattaataatattaaatagctcaacagggtgaccagaggcaacaataatttttttgtacatttaatttttatatacattaaaattaactaaaagattataactggatccagcactttgggaggccacggcaggtggatcacctgaggttgggagttcaagatcagcctgatcaacatggagaaaccccatctctactgaaaataaaaaattagctgggcatggtggtgcatgcctgtaatcccagctactcaggaggctgaggcaggagaatcacttgaaccagggaggtggagggtgctgtgagtcaagatcatgccactgcactccagcttgggcaacaagagtaaaactgcatctcaaaaaaaaaaagattacaactggaaagtttataaaacatggaaatggtaaatatttctggtgacagttatcccatttaccttgatgtgatcactataaattgtttacctttatcaaagtatcttatgtaccccataaatatatacacctactatgtatccctttgatgtaaaaactgaagaaatatttagaaaatttgcttaggaaagaaataataataatataaattcaattttgggtttaatgattttctctgtggtttttgtattttcaactgtagtcatttctattcttaataaaaggaaatatattcttggaaagaaaaaaataaattcacattgatatttctactttatacttaatattactattttttagttaatatatttgataattttatatttctattcttagttttacattgaaattagtcatacaggacacttcattattattcatttgcattttaaaataatttatagaactttttttaagttacaactaaaataaagtacttagtgaatttatgtttttgctgtagtttttctgtttgtttgcttgttttgttttgttttgagacggagtcccgctctgttgcccaggctggagtgcaatggtatgacctcggcttactgaagactccgccccctgggttcaagcaatcctcctgcctcagccttccaagtagctgggattacaagtgtgcaccaccatgaccggctaattttgtacttttagtaaggacaggatttcaccatgttggccaggctgatctcgaactcctggcctgaagtgatccacctggctcagcctgccaaaggctgggattataggtgtgagccaccatgcccagcttgcagttttttttttttttagtatataattcagtataaacgttgagacacaatagcatcttgcacttataaaaagtcttgcaatatttacttttttctgtacccttatatctttgatttgattattcaattacctatagtagatatatttttcagtttcatttaaatttttacatttactttttaatcttttgctttaaatttatttttgcatatatgaaaaatttgtgttggtgatgaaattatctgataatgttttttcggaaattctagttttctttctattttatctgtacttttcctcttcttgtacacactatattagcttttggtttctgcttttagtgttacttttgccaatttaaggaaatatataccattaccttctatgaaagaatgtgttcttaccttatatgtaaggtaccttatatgtaagaatgtaaattgaggaaaaaataataaaacttttataaatccagtttttgatttaatgattttctccatcgttttcatatgtgcaattatcttcatatatattctcacttattaaaggaaatatgtatattaaaggctgcttaggatgtggagaaggggtaaccttcatacactgttgggtgggaatgtaaattttatgtaagaatgtacactcttatatatgttagcctaacatatttacttatttaccctttgctcttttgatttaaacttatatcctgatgataactctatattagtgtatggaaaccttcctcattcatttttacagcagcagattatttgtgtgcaggtattaatagtgtacttagcgatcctcttataagcatttaaatcatttccagataggaaaaaagcacacagacactttcatctcagagtctggagtaagggttgaagcacaatgtggactttaaattgatatttttcttctgaatatatatcagaaattaacatcagcatttattaaaatgtgaagtaagcagaaattctagcttcacctatcattaatgagaattagagaaattgaatgtaagtgcatctgtattacgtatacatgcattttatgaacacatttatatttctgtctcatatgtacatatacatgtagatgtttagagatctagatatcaatatagatagagatatttatcacataattatttttgatagaataaaggtagaaatttctaggagttcagtgagagagggccatggttaactaaaatttgtaaaaaattaattattgaaaatattgtgatggatttataggcattgatttcagggctgcatcgaatatatattaaaattgaaaacaaagtcttatgacataataacagtttcattccattgtttactgtaaaaaaagtttgtcctatgtttacatgtatttacgtaagcaaatattgacagaagcaatgaatgtttaacaacatcaaccagtacatgtatataatcccatttttggacacagatcaaatacatctcagctaatatcatagaaagttgtttaaatttgcagtcacactccaatatagcaaacaagatcattggcatgacgtgaagaacagaacttataaattcaccaccactttctacccagaactcagtgataacagcttgtgagcaaacttaccttctttgagtaggtcactgggctccctaagtttacttggctctgattttaggttggcagtctaaagtaaacaatagcacttcttttgaaccagatagggaagaatggctctgaaatagtgcatcctatatgaatcttttctttgtatctgtatttaaggacacctgaacacattactgttaatgacaaaacataccttggccatcttggaaattctttcattcaataggttatgagtctgtcatgacatttaaaatgataattttgatgaagacatcacatcacaatgattaaaaaaattccaagacctagaaaaaattaaaagtttattatattgaaaattaaaaatagttaaggatagattttataaagcattattgcaccaaaaaaaaattcttggtcaaacattatgttgtaattctataatagacttttccagtttgcccaaggcagttctaatttatacctgatgtttcaacacaatagaaaataacagtgcctttgactctgaacggagtgctatgaattgaagaatagaaattatatactctgtttcagcgtggataccacaaggaatgaggaaatactttcctcttaaccacaaaccctcaaaaacaccaaccttgttcctgttttgggaactctgtgctagacattatcttagtctagaatacttaccaaattgtctcaaaactgcctcagggttgacagatttttgcttaaatataatttttcaaagctttttactgactatattatttaggcatacattcaactgaaaataacataaaacccaactagtatagctgaaaaagtaagggatttacttgttccatgcaccaaatagtttagaaagggttagtcgggcttgaatggcagctcaattttccatcaagtactcaagaattttgtattctagtgtgcttaaatgagtacacttttgtccctattcttattgcttcatgatcttaaggtagccgctccatctgcaaaatccatgtttacaatagtaaaagggttttctcatagtaagactttcaaattttacttgggaacgaatgccatcttcagagacattcacctgcctcttcttgactggaactatattgtatgaacacaccaagatgaaagagaatgagagaagcgggtatatttgcatgcagtcctgaaaaaaattggaatctgttaatatgggaaatagggaaacagatttgttgtaagcaaacggcaacatacaccactttgatcaaccaaactcaaatattcttatctcagcttctatggtttgaatgtgtcccccaaaattcacatgttgggaacttactactcattgcggcagtgttgagaggtggggcttaatagaaggtgattgggtcacgaaggcacagccctcatgaaggcgttcatgcagtcactgtggctcagttatcacaagagcgggtagttataaaagtaggccagggccgggcgcggtggctcacgcctgtaatcccagcactttgggaggccgaggcgggcggatcacgagatcaggaggtcgaggccatcctggctaacgcagggaaaccccgtctctactaaaaaataaaatacaaaaaatgggccgggtgtggcggcgggcgcctgtagtcccagctactcgagaggctgaggcaggagaatggagcgaacccaggaggtggaggttccagtgagccgagatcgcgccactgcactccagcctgggcgacagagcgagactccccctaaaaataaataaataaataactaaaaataaaaaaaaagtaggccaggaccctcatgttttttctctcatacaaactctcttgctgttgtgcgctgcaccatgggatgacctcactagatgccagaaacgtgttctttaactttctaggctccagagccatgagccgaaataaacttgtattttttttttttttttttttttttcagactgagtcttgctctgtcgcccaggctggagtgcagccgcgcgatctctgctcactgcaagctcctcctcccgggttcacgcctttctgcctcagcctccggagtagatgggactgcaggtgcccaccaccatggccggctaattttgtttttgtatttttagtagagacggggtttcaccgtgttagccaggatggtctcgatctcctgacctcgtgatccgcccgcctcggcctcccaaagtgctgggattacaggcgtaagccaccgtgccccacctgctatattcttaatgacttgataagtgtctagaataaataaataattatagttttacattatattattgtataaatgaatgaggaaatacatacatgattgaacagtcttgtattaattaacatagtagatgagactataattttgaaggatatctactaataaatattcaattatttatagttttcataaagttgtagattcactgtaagtccaaaagttagcaaattcttttttaatcatgtttaatcctagaatattacagtcataactaggttggtgatgctctatcccagtggtgtccaatcttttggcttctctgggccacaatggaaggagaaaacttgtcttgggctacgcataaaatatatataacattgatgatagctgatgaggttaaaaaaatcacaaaaaaacataatgttttaagaaagtttgcaaatttgtggtgggctgcattcaatgtggtcctgggctgcatgtggcccatgggccttgggttagacaagcttgctttatacatctactttaacaattaaaagtagagaaaaattatcataaattctgctatcctttgtagaatctctgaattcaacatttactagaagtctcaaagtttgtgttacactcagcatcacattgagtgtgactgctcaacggtgggtctaatgtgccacatctgcataaaaaccagaggtagcacagtcaccacctacagtttcttcttatctttactcttttcggatcctcactagtaatgatacttcatattgtaatggctccacaagcttggcagccatttctatggggctctacttggtaaatgggacaggataatatatctatgtcttgtccagaactaggaagaagtgtcgggataccaagaagaaaaggaggaattaatgcttcaagtatttcacaattgcattcttaagcaagaacacacaactcattgtttttcttcacagtaagtccaaattttctaacatcactccttttccgtctcacacatacacaccaatctatcatcagatgtgtgtgaattcaaacaaactgcctgttttatgaggtagtatatttcaaaaatattaagcaatgtctttttctgtagtgagtgttttctgaagtcattttatccctactctgtttcttgtggtcaagagatggctagatgactttcgtctcagaaaatagttaacattacaggaagggtacaataaagtctctttacttttaaatttcggaagttcagccacaagaaggaacacacaggactcctgtgcacggacaatggctagaagagaaacagtatgtgaacatgaaaagccacatactttaaatatttcctgtgccatcaaaaaagaatgtcaaaggataaaaaaatgtaagtagatactgtggtcctccaagaaaggggctcacttgctggaaggggactcagtagagaaactagaatgccacatgcatttggagttaccagaaaatagatggtgaatttctatattcgccttttttttttaacggagtctcactctgtcacccaagctggagtgcagtggcgcgatcttagctcactgccagctccgcctcccgggttcacaccattctcctgtctcagcctcccgagtagctgggactacaggcgcccgccaccatgcatggctaattttttgtatttttagtagagactgggtttcaccgtgttagccaggaaggtctcgatctcctgacctcatgatctgtctgcctcggcctcccaaagtgctgggattacaggcatgagccaccgcgcctggcctcctccctcttttttgagttatcaactcaaagcaagatgacttcttagtagaaaggatgacgagccagagacatccttaaaaattgtgcattctccatcatggcattgaaaaatgaaatgtttcccaaggccctgaggagagtgctgatgttgcagatgccttaaataatgcctaagaattttctttatctcaatgtggtgagaaggaggcagaagaatgatgcccgtgtaccatgagtggcatgggaagtccgcagaggtagaaaagataaatagagcagggaccttaatggatcaatgaccaaaacctggaagagttagtagatgcctcagagaactccagcaagaacagataacagagtactaggtggggcaccccttgccggtccccattgcctatcatcattggatattagacacaaccctgaggaaagaagtagatgttaattaactggaaatatgttttcaccaccaggcaaaataggatctggaagtattatgtctagttacagaaaatatccattacattacttttacagcaaatttatggactgagatttgtaaacactatggttttaaacaacatattcattgtttcctacttatacccagaaaattccaagaaagccatttgaaagagagattagagcaaggtataagtgagatgagagtattttttttctaataatttaagtttattcttaagggtactatgtgttctgcctttctgcatccagtaaaaaaaaatatttaagacatatttgctttgttccatatttctttatttactttatcattatcccatgagtttacacaaaaactcgaacatatgacagggtaaaaaaaataccgtaccctttaaacagaaggagcttagaaaatgttaagtaacctttcactaaactttctatcatcacatactttaaataattgtgaaaaattttctgttgtttgccaagtgccaccagatggtcaggaggaaagagccagcaagaatccagcttattctctgacaacacctttgacaggtgtaagctccagataatcagaataggtacttccgtatctcttctcattcctcattccacgatgtgaaaagcacatattagatccaacagttctcatgtgtaacatatgttctgtattttaatatgaaatagttttttcatgtccattattcaacagcttcctctccaattgctgtcgtgacaggtggttggcagtggctcagaaaggaatccaataagaaataaagaagaattaaacaagcatcagccctatgagaagcatgccggaagtatcaggaattaacacttctaagagcaacctttaatcaacgacaaagtaggaggctaaatatcccatgttttattttacccccatgagggacatctctgatgtatgcacacgtacaccctcctgaagatctctagcaggacagatgcctaattgctaatagctgtaacctgctattaacatatcctcattagattacttcattgccctgacttacttcctcactacactgccagtgttttctgagatcaccttccatataaagcttcatccaaacccttactgctgtgtctgctgctggtagaagccagcttatatcatccacaatttcctgaactgaggcaaatgcaagtaccttctctgtggaatattgtgactctttcacagtaccagggaaactagggttcccctctaggttcagggtcccattgcccttgcggtttgctgtccatgaataacaggaccagctccatggacctacatccagtgcaatagcacaggctcccatactcagaaagtgccctcatacttggtgcttagtgctctccatttgctgtcttaaaattcttaataatgctatgtttgcacttgtgttttgttcaatttgtttgaactttgcattttggggaaattgagcacttacaggaggcttaagggacttagctcaaatgcagctggatctcctgccacttctctgactctcccaggatggtttcttggctgccaaacctgtacccctgacccagacactgctgccagatgggcttagtaggggcctgggctggttgcaagaaatgtcaagattgggtgctcaccctgtgcatgctgagttttccagcagagtgcaggcacctatgagggtttgtactcatcctgtgggcatcaccatacctaagggagcacgtgtcattagatagcaaatgaaacatccatgagaggtatattagttgctcatttgatgccacaaaaattacggcaaatttagtagcttaaaacaatgcaaatttattctcttatagttatgtaaattaagaatctaaaatgggtctctctgggcttaaatcaagtttccaggactgtatttctttctggaagctctaaagtagaacacattttcttgccttttccaagctctagaggcagcctacattccttggcttacggcttcttccatcttcaaaggcagctatggcttgtcaagtctttcttacactgtgtcactctgacactgattttatgctacctttttccacattaaaccacttctgagataatattgagttcaacaatataatccagcataatgcttcattttaaaattagctgatttgcaacagtaattcttgttatgccatgaaagcaagatttcatcaggttctagggattaggacgtgcataatttagagagacaattatccttcctaccacaaaaggttgagagagagactgccgaaaaaggaaaaaaaatacaaaaagatatattttaaaaattagctggttgtggtgacaagtgcctgtggtccccattactccagagtctaaggtgggaaaatcatttgagccgaggtgtttgagtctgcagtgagctgtgattgtgccactgcactccagcctacgtcacagagcaagaccttgtctccaaaaaaaaaacaattaaaaaaggaaaaaacaattctgccattaaagcaagagactcacattatcttttgcactggaccatgtgtagccaactctggaaaaggcctaagtagaccctacactgactcttctcctcgtccgcatctagttcacaggaaacattcatgcatcctttgcttccataagtcctggggcagcaccctctcccttgctctatggatgtcttgtctttctaaggcatgagttcatacatcagatttcatctctctcaattcaggacctctacattctcccatagaagtttactcaccagacttgcagcgaaagaggtagcatcctttatccttgcctgctgagtactcacagtgcacagcaacagctctcacaagaaatattttcccacaattcaccgtatccacttcgacagcttctgtatatcttcaatgcactagtttcctgtgactgctgtaacaaataatcaaaaactaggtgacttaaagcaaattggctcagtgtggtggctcacgcatgtgatctcagccctttgggaggctgaggtgcaagaacttcttgagcccaggagttcaagaccagcctgagcaacatagtgagacccatgtctctataattttttttttaattagctgggcttggtggcacatatctgtggtcacagctatttggaaggctgaggtggaggatcgcttgagaccaggaagttcaaggctgcaatccagctgtgttcatgccactaaactccagcctaggtgacagagtgaaatcccatctcaaaacaaagaatgaaagaaaagaaaataaagaaacagaatttttttttctatacttccagaatctgaaattgacctagtgtggtggttcacgcctgtaattccagcactttgtaaggctgaggtgagtggatacttgagccctggagttccagaacagcctgggcaacatgggaaaacccgtctttacaaaaagatacaaaaaatagctgggtttgatagtgtgtgcctttaatcccagttactcgggaggctgaggtgggaagattgcttgagcttgggatacagaggttgcagtgagtcaagattgtgccactgaactccagcctgggcaagggagccagaccctgtctcaaaaacaacagaagcaaaagtcaaaaacaaacaacaaaaactgacatcattgtcaatggctgaagttaaggtaccaactggtctatgctccttccagaggctctaggacagaatacattcatgtgtcttccagcttctgatggcagcctgaatttcttccctcataaaccacattgctccaattttcaaggtcagtctcttcaatttttttttttttttttgcttcttctgtctcttttttaaggagacaggtatttgcatttagggttcaaccaaacaacccaggataataccctcatttcaagatcattaacttgacatcatctgcaaaaactttgtcatgtaacattgacagactgcaaggattaagacttagattttgggggagaggttgaggtagggaattttcagcctgcaacagtttatttgactctgtaatgaacattcaggagctgaagggcatatggcctgatcatacaattctaaactttttaaaacttaggtaccagagacattcctgcaggcctcacttgatggttaagaaatggattaggggagtagttcttcctggatgactgtcacttgcttatatggtttggctttgtccccaccaaagtctcaacttgaattgtaactcccataattcccacgtgttgtgggagggatcaagtgggaggtattgaatcatgggggtggtttcccctatactgttctcatggtagtgaatcagtctcatgagagctgatgattttataagggatttccccttttgcttggctttcattatctcttactgcagccatccatgtaagttgtgactttgctcctccttgccttctgctgtgattctgaggcctccccagacatgtggaactgtgagtcaattaaatctctttcctttataaattaccccgtctcaggtatgtctttatcagcagtgtgaaaatggactaatacagtaaattggactggtaaagtggggtgcgccataaagatacccaaaaatatgaaagcgactttggaattgggtaataggcaaaggttggaacagtttggagggctcagaagaagataggaaaatgtgggaaagtttggaacttcttagaaactttcatggctttgaccaaaatgctgatagtaatatcgataataaagtccaggctgaggtggtctcagattgagatgaggaactggttgggaactgaaacaaaggtgactcttgctgttttagcaaagagactgacagcattttgcccctgccgtagagatttgtggaactttgaacttgagggagatgatttagggtatctggcagaagaaatttctaagcagtaaagcaatcaagaggtgacttgagtactcttaaaagcattcagttttatgcattcacagacagatggtttggaattggaattggaacttatgtttaaaagggaagcagagcattctgctttcacaggctggcactgagtgactgtagctttttcaggtgcatggggcaagctatcagcattaactcaaaagtccacagtccaaagtctcatctgagacaaggcaagtcccttctgcctataagcctgtaaactcaattgcaagttagttaattcctagatacaatgtgggtataggcattgggtaaatacaaccattccaaatgggaaaaattggccataaaaaatgagatacaggtcccatgcaagtctgaaatccagtgaggcagtcaaatcttaaagctccaaaatgatcttctttgactccaagtctcacatccaggtcatggtggattgtatttaggaagtatctaggaagtaactaacttgcaattgattttacaggctcataggcagaagggaattgccttgtctcagatgagactttggactgtggacttttgagttaatgctgaaatgagttaaaactttggggtactgttgggaaggcatgattggttttgaaatgtgaggacatgagatttgggaggggccagggggagaatagtatggtttgactctgtccccacccaaatctcaccttaaattttagctcccataattctcatgtgttatgggaggaacctagtgggagataattgaatcataggtgccgtttcccccatactgttcttgtggtaagtctcatgagatctgatgattttacaagggtatcccctttctgcatggctcccattctctcttgactgctgccatccatggaagatatgactttgctcctcctttcctcctcctatgattgtgaggcctccccagccttgtggaactgtgagtcaatcaaacctcttttctttatacattaccaagtcttgggtatgtctttatcagcagtgtgaaaacggattaatacacttgtctacagtttctgtagcttaagtatcagcggtggggtctgagacctgggtttttgctatttacaggccttcccagagatgggaataaataggaatccaaggtgaaaaaaaaaatgccttccacgtttctctaaattgcttttgtaatttcttcatatgatgaggtctctctttccctcactctggcaattcataactcttctattggctcctcagtcaaaacagacataatgagagttccatttgccattagttattcagaagaataaactgaacaaaaggagaagcaggtagcactgaacttttttttttttttgagacaaagtctcaccaggctagagtgcagtggcatgatctcggctcactgcaacctctgcctcccgggttcaagtgattctcctgcctcagccttccaaggactacaggtgtgtgccaccatgcccagctaattttttttttttttttttttgcatttttagtagagacaggatttcaccatgttggccaggatggtctcgatctcctgaccttgtgatccacctgcctcggcctcccaaggttctgggattacaggcgtgagccaccacgccaggcctgaacatttttaaatttatcaatcatcatcactcagttatgataagtgctaagtgtacaaataataacctggatagtaacttgaggacacaacttgaaaaggtcatgttactaatgaataactccattggctagagagatcactgtcaggttaaaagtttcagaagtatatgtgaatagtagtgtccataaaatgcaaatgtatgtagctaaatgattttaggaatttcctgtattctctcaactcagtggtttttatctggaaatgaatacaattaatgttcttgcaaaggtaatataaaagtgcaaaatgaagtaaaaactgtaaaaagcactttgcactaactccttcagcttttttttttttttttttttttttttttttttgagacggagtctcgctctgtcgcccacgctggagtgcagtggcgcgatctcggctcactgcaagctctgcctcccgagttcacaccattctcctgcctcagccttctgagtagctgggactacaggcacccgccaccagatctggataattttttttgtattttttagtagagacagggtttcacagtgttagccaggatggtctccatctcctgacctcgtgatccgcctgcctcggcctcccaaagtgctgggattacaggcgtgagccaccgcacctgacctgaaatatttctaaatatcacagaaaaagaaatgtccagtgataatctaatatatggtgcttagacagaaaataaaaggcactcactggattacatttttctaagcaattttagaagagtatcgttatgtattttttctagtattttaaaatacatgtttttactacaacatttttgcaagaggcaagtgtgtattggccctgtaaagactgtggaaaattatttcagtgtgattcactatgaaaatactaaatcagcattactagcaggggtgctccatcaatggtgcacaagagaatggctaagtattgattttcttccccgacaggggtcccaacctcattttaccaatatgcctgaagttctcccttctgttttctagtttgttctgccaagttccataaaattgtattccatcatatttgttcgctattacttccttaaatatttctatcagaaagtccgtatagctttaggacatgagctttggcaatataaacgtggttcaaattttagctccatttccactctttactggtttgcaacctgttgaagttacttaaactctccgaacttcaactgcctcatctgtgaaatgggagtaatcaaaatttactcatagaactttgttaggataataaaagaaaagaaaaatgcaaagggtgctgcccattgcctgccacatgctaattatataatctaataaatgttgtcttcattgttactctaattatgactaccataaaattagtagttttgcatcatataaaactacagaatctacaattagttgtgcaaatattctacttcagactagaagtaaatatacagaaaatttctttttcagtttaacaattcaaatgttaaaaataactttaaaaatcagaaaaggaaaatttacatttgtgaattcaattatgttccaaaaacaatagctatatatgtttatctcagtggaattacttgtgtatatttgtacttttccaagtcatgtactccgttaaaatattttgtccgaggaaaatgatggtctgcaacaggtgcaatgtctattcaacatcatctatagtccagtctcttctatgctgtaaatggatcatgagcagacagatgacagtggtagataaattgtgtttcaatacgtagtttctttcacatctctggaagagctactatataataattttactaccacctaactaaaggtgtttgctcttatatttagagcactcacaaatgaaaatgtcctgaacctgaccacgtggatacaataaattcaactaaaatattctatattagaatatataataggtaaatcattttaaccttccaagaattcaaacaacattgttttataaaaagtattatctcttgcttataggagaggtattctcatgataaatactaaattagtatatagatattatagaattatttcatcaatgtacgataaagtgtattcaaatttgagttctcaaaagacttttcaattgcaatccttcattgtgaatccagtctttcttggccagaaatatcagcactgtaattaaaacatacgttttagttaaatggatatctgaggcttcgagagagaatatatttcaaagttaagtaaggagatttaattatttttaaaaaggcaataataacaaattcgccatagctatagcttattcatatgtacgagtgtgtattgtttgttgaaatctgtatgaaaaatggtttcatgaatatgctttaggaaattaaacattttagttgacatataatagtctaagaatattataaagtgattataaatctgtaaatcaatggaaacatttacgttattttgacaaatagtataaatattaaaactttgtagggcttaatcagataatattcaatatcataatgaagttcagttcatcaattcagactctattgcaatatatgaagtattcaaaagagaagagaaccccagaattagttgtattttagttttgtattttcatgtttatatgaaatatgggggcttaaaattttattgaatttagaaaagttcaaatggtcaatttttgaagacttaaatcagaactctacaaaattatattgctttcatcttccttgatctctggctcaactgagtggttaaaagcatcaccttgcaagtggattcagcacatacctgagttaatctttatacatttactctctacaggaatagcacatcctaatttttctgcaaaagtggagtgtatatgacagtagggttgggggcggggatgaataaatgtttataaaagtacactgaaatttcatttttgctagatgatttctatctgatgaaagatttctacaagaaatagcatacctaaaaaattattttggaagcaaacatcagtagtttcatttgtatgtatttcttttcattcacataaaagacttttaatgttcctgagcatggctttgtaatcaaaactcttaccatacagaaaatgctgtagattggatccagaataagcataaacaaatatactaaagacttacgtaaaatgaagttgtttgaaaaaaaattaatacacctgaaggaaaaagtgttctatttcacatttaagttctgcttatgggaaataaaattgttgatctattgctatatggttccttaaaattaattgcacctgttaccaattatttgtcatttcacaaatgtcaacatataaagaatatggttacaaaatgttggagatgccaacaaatttgagttacagcacaaagggcccagaaacacgattttgaatacgaaatactgtcttacactaaattagatcttgcttactgtaatttaaatttgtcctgtttctccccagtgacctaaacttagctcttttgctacacatttctatgttgcttatagaaaatttatcgcatattttttgttatttttaattgttatcctgtctgaatgtagtgtctggagtgaacaaaagaccattttcacattggtttgttttttgagacggggtctcactcttacccaggctggagtgcagtggcatgatcttggctcactgcaacctctgcctcctggtactcgagcaatccttccacctcagccttgtgggtagctgggactacaggtgcttgccaccatgcccagctaattttttgtgttttctggtggagacagggtttcaccatgttgcccatgctggtctcaaactcctgaactcaagtgatctttctaccttggcctcccaaagtgctgctattacaggcattagccaccacgtacagcctcattttcacattttaaatattcaacaataaaaacataatatcaacttttatttaaatttgccatactgacttaaatggagatacagatacaaaagaaacgtcgtgaaacacagtgactcatgcttataatctcagcaatttgggaggccaaggcaggaggatctcttgagtccaggagttggagactagcctgggctgcatagtgagactttgtctctccaaagagctgaagggagaaagaaaaaacctgcacagatttgatgaaaaaaggggtttcttaaacagaaaagaaaataaattaccttccctcaattatagaagtaggatttctgaactatgtatttaggaactgctacatgttgatatttcttgcaggagtaagacaatgttcaaaatctgggaaagtcaaatgtagttagcagcttgtaatagtgactaaactttcatacaattctgagtgtaaaggcagaaagggctttagattttatgtcaatatgttaaggtatagagtgagtataatctctaacatttattcatttaaatttaactattttaacacacatgcacacacacacacaattcagtaaacacatactagaaaattagaaatggaaagaaaagatggattagataaagtaataaactatatactatcaataaatgtgagaaacattaaaagtgaatgatcaagtatgtgggttattgtataaggaggggtctggctgaggctcctgttttgcagtttgagtgactgggaaacagtgatatctctattatgattattagaccaaggtaatggaaaaatatctgcagactgagtacaattaagagattttacctctttcagctctcacaagatattccagtgatcaaaagcaacaatagatacagtcctttgtctatgttcagtgttaataaaatgaccagatttttgttcatccaatgttggaggttgcaggctgaattttgcattaggaagattattgagaggaagaaaaagggacagtcttttcatttttcaaaagtaagaaaaaatgatgaaggctgagaaatcttgaaccaagttgtcctactacaccaaacggtccccaggtatacacttctttgaattagaatatttcagtgaatatagaagtaaaatgtgtgattttctccaggcacaatacttgctccagagaatagagttgggctagaaagatataaatcaacttggttgtctgtgaaatacatttctgcataaattatcaccaactaaaagcttagccataatttgtcacaattccatttggaggaattcagaatttgccttgattgtttatatatagttttatatataattatgctatatttgtcacggctaagaaatcagaattgatacattactctaaactaaacatgatgctatattcaaattttcctagcttttccaccaatattttttcctgttccattattcattccaggatatcacattgcatttattttttcatgtcccctttgtctcctgtggtctgtgatcgtttctctgtgttttctttcttctttttgactaccttgacaagttttgaagactaatggacagatgtgtcgttccttaccttggacttaactgatggctttctcatttttagacaagagttatggatttggagggaagaataccatggagatcagtgtccttcttcccacatctatcagtaggtatgtggcatcaacatgatgttattagtgatgtcagccttgaacatttggtttagatactgtctgccagatttctccaaataaagttaaatttttatcctttccacatcatattttttgatacgaaaatcattatgtcttgctgaaattcaagggtgaaaatttagccccacctcctggagtgggagtatctatctatcgatcatctatcatctattcatctatttatttatctattatctatctatctacttatctatcttagttttatcaggctgtcataacgaaatagcacagattgtgtgtcttaaaccacataaattagttttatcacagttctggatgctgggagtcccagatcaatgtgcacgcaggttcagtcttccctgaggcctcccttcctggcctgcagatggctgccctctggctgtctcttctgagggttgtccctctgtgtgcaagcacttatttctctctctctctctctctctctctctctcttctaatctcttctttttaaaaggatactagtcagattgaattaaagcccaccctaatggcctcactttaacttaatcacctttgtagaaagaagccctatctcaaaatatagtcacatctggggtaatgggattacggcttgagcacatgaatttttggaaatctcaatacagtccataatatgatctttcaattagctgtaattcttctgtaagaaagagtttctccttctcctctacttattcatcatttatttacattagcatggactcaattattttacactttgggttatagttcaatgctacattatttatcttgttgatcacattttttccagcttcagatgtcaggggtgtgtccacattggccctggggttcccttgacaagcctgcatcttttccaaaaaatgtgttgagcacttctttactttctgatacttgaattggtgatttcttcatatcaacttgcgctactccaaatactgaacagtgaaagaagtaatgtatgttaattatacacatgtttcattgaccaaagccagtcacattccttcaaggaatgtgatatgatggaaggttaagcaagtatgatggaggactaaggtagctattcatgtttctgagataaaagaaacacaattataaatatattgtactgagaaatatgaattctatttttgtttgtttttcttctggttactttttaatatttgtaacttctttgaggcaacaatgttcttactttttaaagaacattttttaatgagttttccaaatgacctttaacgtaataattatttgattatttaccttttaaaaacttcattttagtttttactatctttgccaaggttttggggcagttgcttgcaactaaaacaagaattgtgaatagctttagataatggttttgaaaacatgtctagaatatatgaatcgattgctaactgacagcaaagattatggttctcaataatagtatcataaaaattaagataaaggttgaatcatttttatggttccatgaattaaaattatactggaatgataggagacatacatcattagtgactttgccatgaacagagttttagcattaagatgttaataggaattatgtagaggaaaagaaggctttgtggtcaaataagtgggaaattctaggtaaaatgaagtaagcaagtttatttactgttggatttctcaagacttccattaaactaaatgtgttttatgcattttatgaaaaacatttgtatacaatatttgccaaagtatttgaatgtatggttagtcttcatccagaaaaagcaaaaccaaaaacaaaggtttataatatagggagtatatttcgtaggtcaccccagagaacaggaattgggaacagagaatgaaaaaaataaaatacaaagtttagttatcaagttggttactaatatggttggctaatgttgatctcacctgtgaccttttaagaaataatattaaatgtatcttagaactgactgctagcagcatgaaacaagaaagatttgtccaccaatatatatccctattagatcaatgatgactctattggggtaactcttttgaacagccgggttcacatatttggatgtcagagtgcttcctaaaagcagtctctatttgttatgtcagataagtccttgggtgaaaaatagaggtagaaggtctaggtctaagtgaaaactgataaggtgcaccagtgtaaaaatagttaaagcctactcagaattggttgctgaatcaaagctaaacatgatcagataaaagttagaacacagggaattgatacattgaaggacatgttccctgtgcaaacctagcaccctgtaggatgaaggtcaccacttttggaaaatctaatttcaataatctgtagtaaaatatatattctttggagaaagctgtaggagaatacgctttgagagtcaacttaattttctcatgatggttaaatttatttaagtaaatcttataattaacacaccatgtaagtaaaaacactaataaaacataatgaaaatattgttaataataatcataactttaaaaaatgttattaaggacagtatattgaataccttcatctttactcaaatttagaaatattttttcatatatttaaatgtgatactaatgatgaatgatcaagatgagttaatgaagcaaataagtcttacaaaaatatataatgaatctcagtaatgatgaatcttcatagaatttgcaagaataaaaagatataaataaagttctaatttggcctctggatgcagtgaattgtcataaactttaacggagccattgcattataaaatgacaaaatattagttctttaaatgtatgtgtatgtacatatgtatatatgtttgtatgtaaatacatgtgtacatagacacaaacacacattcatttcttagaaataaacttatttgctataagcaaattctatagtaactttttgtttactcattgagaacacattcatgatatataatgggagtattattactttcataggcgtaatatctgtacctccattaaaagcaaaactacaaaaagccatttaacaatacaagttgttgttcacaatgataaacatctatcaagcaatcagactatcgaggttacttcaaaaatatgaaaaaagaaacatcaaaaaggaaaagcaatttagaaatgaaagggaatgaaaagctaaaatactgagttctaatcccctggaatatgcaggggtttgtgcctttatgggtttgttgttgttgttgttgttgttgttgtttttgcttttgttttttttgagatggagtctcgctctgtctcccaggctggagtgcagtggcgcaatctcagctcactgcaacctccacctaccaggttcagccattctcctgcctcagcctcccgagtagctgggattacaggcacctgccaccacgcacagctaattttttgtatttttagtagagatggggtttccccgtgttagccaggatggtctcgatctcctgacctcgtgatccgcccgcctcagcctcccaaagtgctgggattacaggcgtgagccaccgcgcctggccacgagtaagttttattggcttcctgaacccctgttttcataaactagattttgaaaaatactgtatctctattgagctgatgtaaatattaaatgtgaaagacatgcaaaatttcctagcatagaaaagatatattcctgatcttcaatgcatattgtgttttatcctgacaataaagattacagatactgatataagtaagcacaccaacataaggcatttgatagtgcctgacacaaagtacagacccaatgtattttctctgagtacatttatgaatgaatgaacatactcttatgtatcccctaatgatttcatctaattccgtgattgtgtcacctaatgcaggttaacctaggttataagaatattttctactccattgcttgtgtccatggacacaaagggaaaaatttacgtagcaatcatttagttactttgacttaccaaacagtccacatggattggataattcttcaacaaataagtaaattgatattaccctaaagctaatgaaacataaactatttttttgaaacgtatcatctacttcagggtgcttatagagtgttcatcagcttctcactgtaaataaatatataatctgtgttgctggaggatgagatttctattgtaaaaaagtttggagaggcattctgggaaaatatatggtgaaatcaattgaaacattccccaaacctggccccttctccaaatcaaaatggatagtacaactagagcagcaaaaccaaaaccatagaacatgtacaataaaaacaggtgacacattgctccctcaaacctttacgtatgagtggggactgacaaactaatggcaactaaatggttggatgactattaaaattatgcagaagatacagaggtaaacaacaacgtgtctatccacacctgagaagctcagaatggccaacagatactgtcttgaaacctcagcagaaaaatttgagaagagcgcttgaaactggaggggaagagtatttctatatgctacaggatcaggtgaaggaaaagaaaaagtctcattttagctaggtgcggtagcttgcccctgtaatcccagcactttgagaggccgaggtgggaggattacctgaggtcaggagctcaagaccagtctggccaacacggtgaaaacttgtctctactaaaaatacaaaaattagctgagtgtggcggtaggcacctgtaatcccagccactcaggggtcggaggcaggagaattgcttgaacccaggaggcagaggtttcagtgagctgagttcatgccactgcactccagactggatgacagaggaagatcctgtctcaaaaaacaaaaaaaaaagtttcattttttagatcaagaaagaatggaatgccaaactctcttccaggacaaagtctgatacacaagataaacttctaaggatgaaattaaaatggagcagaacacaataaaatgaacatgatgaagagctacaggaatatacaggaagcaagattctgaatgttttatcatttcattaagacaaactaaggggttttcttaagatgtgaagtcactaaagaaattttgaaccactgctcctctttgtatgtacaggaaaaccattttacataagaacgagtaacaggagtcaagataaatttcatatgaagcaattataacagaaaaaaacacaataaccttcctacagacaacaaatgcatgctagaaagacatgccaaaaacagatgagaactgtgtttcaaaactgcctaaaataattacacaaatatatataaaaggcatacctttacaacccagaaatgagagaacagaactcagaaaaactaaaaattacagaaatgtcaaggtcaggcatgttggctcacacttgtaatcccagcactttgggtgggaggtgaaggcaggaggacagcttgaggtcaggagtttgagaccagcttgggctacataggaagaaccccatttgtacaaaaaaaaaaaaaacaaacaaacaaattaaaaattagctaagcatagtggcatgcccttgtggtccaacatattctggaggctgaggtaggaagaaagcttgagcccaggagttcaaggctgcagtgagttatgatgacgctactgtactccaccctaggcaacagagcaagaccctgtctcaaaaacaaaaaaatttaaaatcagaattgaagacaaaaataaaagaagagataagaaaaaagacaacaaggaataaacaaatcagataatgcccatgagaaatggctaacgtgaaaaaatgtccaaaagaaatggagataagtgtgaaaataagttgagatcaacatagaacctagtcaatgaagattcagtccatgtaaaataggtactgctgaagagcaccaaggaaagagaagaatataaatgctaaaaatgttaactaacaaaaattaccttgaaaagtaaaagatcagtcagtaaaggaaaatgtcagtcagtagaaattcatgaggatttatattatatttatatttcctagcttagtccgctggatatacctaaagcaatggcccatcctagtatctagattaaggtatcagaatcttgtttccactaagccaaatgaattgaaaaattgtctgcttcaatgtggatatagattggccacagatgaaaaatgttgacactgaagtgggtaataagtgtaataaataaagccgcatcagtcaggcaaggtggctgacctctgtaatcccagcactttgggaggctgaggcaggcacatcataaggtcaagagattgagaccatcctggctaacatggtgaaaccccatctctactaaaaatacaaaaattagctgagtgtggaggtgcgcacctgtagtcctcgctacttgggaggctgaggcaggagaatcgcttgaacccatgaggtggagtttgcagtgagccaagattgtgccactgcactccagcctgatgacagagtgagacttcatcacaaaacaaaaaacaaacaaacaaacaaacagaaaacccatcaaatgtatttaaattcaagaatgcaaaatgatacttaaaaaataattgactagttattgaggattccagtaaatcaactttttgtcttcaaagttggtaaataagggaaagaatctaccatttattctgcctttcctatattaactgtgtcactgaatgagacataggcaaaataaaacacttttaaaagatatattttagtcctgtgaagaagtttagtggagaagaaactttggaattaggataatgctatttttgcaaccactaatgaacgaagtgagaatctgtggctgctaatattacaaaatgagagacaatcaaatatcatattattcctaattgaaacaatcacattacattaaaatctaacacactgattttatgggatagttctgctgtatgctatagatagaataactataaaaagctcctttaatttgcatcacttattcccaataattatgcatgattccttctgatcttcccatatggaatcaattgcttttgctatatattaaccatatacagtctttttctctaggactctagaggatacatattctaatgagattcagtaagttttagaggcaacgtaatccaagcatatgcagagaacaattcattttctctattttaaggtccacaattaactttaatgagtattttttcattgtccttggagaacctacctgtcaggtcaccttatgtgagggggtgattcaataggaggttctttgggtacttcagttaccagattcctaatgttacaatctaacttctactagatattggaaaggcttccctgcattttatacactcaatactgagtgcattgggtagaccagcataggaacttcagtgaattccttttgtttacatcaataattattattcagtttcaacttgagaataaagtaaagccgagaaagagattcgtaaggcctttgtaaacccttcttaaataagcctagctataggcatcattaaatactgactaacccagttgtacttataaaggcttagctcatttaattgtactttgcatatattgtgttatttacaaattgaaggtttctgacaactgtttctcaagcaagtctattggcatcatttttccaacagtatatgctcacttcctgcctctgtgtcacagtttggaaattcttacaatatgttaaactttttcactattattaaatctgttatggtgatctgtgatcagtgatctttgatgttatgttacaattgttttggggcaccacaaactgtgcccatataagaccacaaatgtaatcaagaaatgtggtgtgtgttctaattgctccactgactagcagtgtttccttatctgtgtgtgtttttgggtgtggtagggaaagggaagtgatattgagcatagataattgcaagtccaaatactcggttgcaaaggttatctagagctttgggaattctgaagcaagacaatctgaatcaaacccatttgaaaggtgttgaaagaaagaaaaatagaaagtttgtctttcagacttaccctcaacatgccagcacaaattctgtcttctctgctgccatataagatatgacctgctcctccttgtcttctaccatcgttgtaagtcctccccagccacatgaaactgtgagtccattaaacctctctctttataaattacccattatcaggtatgtctttattagcagtgtgaagaaaaaaagagtgagggaaaaatagtaacagggattttctcttgcttttctaggtttcccaatccagatacactggttcactcttggcattctggaagcagggatgccactcccacaatacctggggtggaataggtcacctattgaaaaataagaacaaaaacaaaaaacaagaaatcatatgaagattctctccacactcactagtttgcaggacgccttttcctccagtgctctcaccagaaattcaggctgtctttggagtttttgttaagtgtgcctgctatgtagttgatccatttagccagtcccagtctcctctgcaaatccaggacataaaataagaaaaaggccaaagaaagctgataatcactatatagtggttcttcaagtttaaacttcttcaactgcagatattatttacacttcaaatactcaagtagttgcttttgtattttgtccggtctttttagttgtaatctacagaggagatattgtattagtctgttctcatgccactaagaaagacatacctgagactgcataatttataaaggaaagagaggtttaatggacttacagttccacatggctggggaggcctcacaatcatggtggaagaaggaggggtaaaggtacatcttacatggtagcaggcaaaatagtgtgcgcaggggaactgccctttataaaaccattggatcccatgagacttatttactatcatgagaacagcaagagaaagttctgccctcatgattcatttacctcccactgggcccctcccatgacaggtggggattatggttgctacaattcaagatgagatttgggtgaggacacagacaaaccatattattttgcccttggcaccttcaaaatcttatgtcctcacatttcaaaaccaaccatgccttcccaacagtcctcccaaatcttaactcatttcagcatttcaaaagtccacagtctaaagtctcatctgagacaaggcaagtcccttccacctatgagcctgtaaaatcgaaagcaagttagttacttcctagttacaatgtgggtacaggcattgggtaaatgcagccattccaaatgggagaaattggccaaaacaaaggggctacaggccccatgaatgtctgaaatccagtgggccatcaaatcttaaagctccaaaatgatctcctttgactccatggctcataactaggtcacgctgatgtaagagatgggttcctatggtctttggcagctccacccctgttgctttacagagtacagcctccctcccagctgctttcttgagtgtttgaggcttttccaggtgcacaatgcaagctgtcagtcaatctactattctggggtctggaggatggtgggctttttctcacagttctactaggtagtgcccacatagggactctgtgtggggactcccgttccacatttcccttccatgctgccctagcagaggttctccatgagggctctgcccctgtggtgcacttctgcctaggcatccaggtgtttccatacatcctctgaaatctaggtggagattcccaaacctcaattcttgatttctgtgtatgtgcaggcccaacaccatgtgtaaaatgtcaagacttggggcttgcatcctctgaagcaatggcctgagctgtgcgtcgttggcctcttttagccatggctgggatgtagggcaccaagtcccaggcatgtacacagcaaggcaggccctgagtccagcccatgaaaccattttttgctcctaggtctccaggcctgtgatggtagaagctgctatgaagacctctgacatgcgctggaggcattttccctattgtcttggcaattaacatttgggtccttattacttatgcaaatttctacagcaggcttgaatttgtccccagaatttctttttttttgtatttcattgtcagcctgcaaattttccaaacatttatgtactgcttcctcttgaactcttcaccggttagaaatttcttttactagataccctaaatcatctctctcaagttcaaagttccacatatctctagggcagggacaaaatcctgccagtctctttgcatagctatagtgacctttactcccattctcaacaagttcctcatctgcatctgagaccacctcagcctggactttattgtccatatcaatattagtattttggtcaaagccattcaagaagtctccaggaagtttcaaatgttcccatatcttcctatcttcttctgagctctccacactgttccaactttgactattacccagttccaaaatcacttccacattttggtatctttacagcagccctccaccacctggtaccaatttattgtatttgtcctcatgctactaataaagacatacccgagattgggtagtttataaagaaaagagaggtttagtggactcagagttccacgtggctggggaggcctcacaatcatggcagaatgagaaggaggagcaaagacacatcttacatggtggtaggcaagagagcgtgtgtaggggaaatgccctttataaaaccattaggtctcatgagacttattcactatcacaaaaacagcatgggaaaaacccatccccatgattcaattacctcccattggcttcccatgacaggtggggattatgggagctacaattcaagatgagatttgggtagagacaaagccaaaccatatcagataccttcagtgaacttactctgtgttagagaaaactagaattcatactaaggctttttgtttgcaaccatgcatttaaaagtataaatcgtaaatttatgtcttatttgtatttattaatttgtgtgtatgtgtgtttgtatgtgtttatgtgtgtatatatatatatataaatcatatatatattccatagcatttatcactatgtgaggtgaaaatatacatttttattttctcatgttctctttctctaattcaacatccatcacctagattaatgatttgtaatttttttttctgtaaagggcctaaaagtaaatgttttaggccttgtaggacatattgtctctgtagcatcttctcagctttgccattgtatctatcatgaaagtaaatacagacaatgagtaagcaagtgagcatggctgtgatccaactgtacttacaaaaacaactggtgggcagattttccctctcaaaccatagtttgtcaactttgacctggaacatttaacagaatatagtagacatctagtaaatacatgctaaatgagagttcaaaactttaaaaagttaacttaaaactgtaatcccagcactttataaggctgaggcaggcagatcatctgaggttaggagttcgagatcagcctggccaacatctctactaaaaataaaaaattagctgggcatgatggtatgcccctctagtcccagctactcgggaggctgaggcaggagaatagcttgaacctgggagacggaggttgcagtgagtcgagatcacgccattgcactccagcctgggcaacaagagcaaaaccctgtcttaaatggtttctgaattatattcagtgattcctttggcattaatataaatatgccatttttatataatggaatcatttaatataatggaacaattttatccttagtttgtcaacatagttaattgtgtgtgtgtgtgtgtgtgtgtgtgtgtgtgtgtgtgtgtgtttcatattggatccccttttaattataaattgtacttgtctgctctatattgctctttcataatactgataaatttaacttattaaatattagtttaggacgttggcatctatattcacaaatgagatcataacagtttcaattgttgtgatgagcttattagttactttgtattttttttatacctactgcttaccaactctcgtggaattcatggataattaagttcacattgtttaaattgactaaataccaatctagacaacccatattttcaacatttgttttggatatttttaatgtggctaaaatcagaagtaaatatgtcattggaaatattcaaaaatcaaatgtgattttatttcaaggcaaaaaattaacatacatttgagaacccactatgtgggagatattcagaaaagcattgagtatagatagaactaagacacagtttctatctccaaggagctcaaagcctaatagaattcagaatcaagcagaagattgtagagaggcagagtttgtgttacatacatctgaagagtggagctctatcagtctcatacaattcacttctctagaatgaaatatttctcatttccaaacttattattgcctcatgtacaaactcacatcttttattattattattgtttaatcatcttcaagatacatattaaacatggaaactgcacatcttaattttaaggaatttctaaggaaatgtctatcctaataaataatatgtatattttcttctttgttaaatgaattaattaaatataaaatacaataaccaaatgtcagctacccaatctttctgtagccttttagcttgtttcatcaatttgtcagatacatggttttgatttgggactcagaaaaatcagtcattgatgcattaacatgagcaacagggagtaaaaggtgtccaactcctaagcctccgggacttttgtaaacagagctcagactacataactagctcaaatgtgagagctgagatccattaaattccatgtatttaggtacagatcaatagctctgctaaaatattcccatgatttaaggattatttttatagtacagcaactcccatatctttttctgtaaatatgccaaaaaataaaatttaaagaaggggacaaagctgaatatttataaatgtttcttgagttagttaaaaattattcaacattctattttattgcttatagttaaaatatagcctaccacgaaagccatagccagcacaattagacttctgaattaaaggcaaaaatgagacgttttgacagctatggaacattgcatttcacgggactcatgcacagctaggtagcacaggtgttcccgtaattgcagtacaatggaaaaattcagtgttcaatggccttcaaattcttcactgttgtgtgtgatgtgatataaagatcctctgtcagtgctgtctcctttctctgtgatgggatgtcattatgtgcaatgtaactgaaaatattttagagttctggctcttcagaatctagatgaaaactaaatatttggtttctttctcatatacctatagtttctgcgggtctgcctctgtgattttacaaatatagaaaaacatttttcaagcctttgttgacaggagtttacattgtgagtgataccttccttttctctcattaggatgctgcacccaaactctgctatttctcaaccagctgcaataattatctttaacaatgtgctgtataatatgaaaagaattggggtgattttttttccattttactcactagagtttttgccaatttcaagtgtgaattccttaaacatcctctcggtaaacaaggacataaggagatagaagcttaggtatgaaaaataggatagatcacatatacctttaaaatcataccgtattcaaagttttgaaagagaacatttcatattaggataatttttgctgaaaaagaaatctgaaagtttaattttcaaaatcacaatgaaattgactcagtgatcatcttgatgcagagccattggctcttaattgaattttttttttttttttttttttttttagatggagtttcactccaggctggagtacagtggcctggtctcggctcactgcaacttctgcctccggggttcaagagattctcctgtctcagcctcccaagtaggtgggattacaggtgcccaccaccatgcccaactaatttttgtagagagggggtttcaccacgttggtcaggctggtctcaaactcctgacctcaggcaatccaccgcctcggcctcccaaagttctgggattacaggcatgaaccaccatgacctgtcaactgaatccttaataaagatctttctgtctttcgaagtttgcttataataattgggcatggcaaactatttatttttatcactattttcaagccttcttttgagtaatttcaccttgatcaaatggaacatacagaagaattttaggcaagtttataaatggtgattattagacatagaagatgatatttcctttttggattgtgcattgaccttgatttatataagtgacattaacctgatttgatcaagagtatctgctttttggtttacaggctgatctcatggctcatgggatttgattgacaagaatgaaatcttcaggaaaattatacccgagctgaaaatgcccatgtgattatttgcattgagcaaatctctatcaaggggccaggtacaatggctcttgcctgtaatctcagcactttggatggctaatttgcgaagattgcctgagcccaggagttcaagaccgggcaatataaaaagaccccatctctacaaaaataaaaatttttaaaaagcatccaggtatagtgacatgaacctgtcaccagctacttgggaggctgaggccaggggatttcttgagcctaggagttaaaggcttcagtgagctatgattgtaccactacagtcaagtctgagcatcagtgagaccctgtctttaaagtaaacaaaaaaataaataaaaataaaataaggaaatctctgccaatcaaatgacatgctcgtgtctcttgactaatagattatctacttgtggggctatcaaaggtaaattgcaatgagaacattgcttgatgagcatggaaatagaagagcaagaattaggtggatggtctgcatgctaatatgccatatgcagttatgtataaatagatattttagtacttgaattagagtctttttctcttagtcatggtggatatctatgtaccagtactgcattgtttgatcctatttttaagactagtgtcacagtttttcttgagaaagtgaatagtatgtctcattcaatacaataccataaataacatttttgtttatttttaagtacttactgttaattattctaacatttaagtgcatacttcatttcagcttgaaattttcctcttattaggcttttcgcgagaataataaatatgggacaaacacacaaattttgcatactcattaataggttgacagatatcttgaagttaattaatgtactactagttaagagtaagttcttaaggcttgcttactttcaggaccagaacataatttgattttgttgttgttcctattaaattcagaatcttttagagatttcaagatactaagcagagcggtgggactaggcattttaaatacattattccacaccaaattcagtgtcaggccacacctagatctcattttagggcagataacatccttaaactacaaagatggctttgcttatggtgaggatgagaacgaacaacagacggtttcattagagacaccaaagaagcaagggaagtatatgaccaataatttctgctttgagtatagtaagaaaaggacaaaaaatagtcttgtccttggcgtataaagagttgaacaaacactaacacagtttctaaccactcaagcccaagtccctaatgtaactctaaccctcttatagtgcctgcttgagaaaatttaaggctgtcccccaaggttactgtttgttccagccaacacctatgaacatggtttctatctcccagtctgcatggaatactagaatcctaactttgataattgccacgtgacagacacagctagcctaacacatttgcactgactaatgctttcgcttccctaactattgagccccttgttttccctccctatcctcctcaatctctctttaaaatgcccagttacttctgcaaagttgaagttgatttcagttcatgcaacagtctttttttttttgagatagtatatagctgaataaaaatccgtccttaccactttaaccagtttttggctttgtttttatttgacactggcaatctgctcacgtctagaaggcttagatatagcaaaataaattttcttttcaaaggttgttaggctaagagcagttttcttatatattcacaggccttttataaccaatcagaaagtcatcccaacaggtaaaagcaattcttatttgacaaatgtggaaggttctttaatcctttttactcttccaatatcaaggttaggtagaaggaaaaccatgcattctccacctgtcctccttcatgcccctgtgagctcttacctgaagagagaaagtcttatccagtttggtcagaggggtggccccaaatcccaggtctatgcgactccttagctagaagctgagttgcctaagatgtgaattgccaaccgtgcacatgccttctggggtcctggagaaccctgggacctcagctgtgtaagggcagctgtcattcctcttgtccaatggcggcatggccagaagactagcagaggcccaacttgcctagtggtgctggactccatgaggccacagtcatggcagtcaccatcagtagggtgggtgtatgggtgtggggttgggggtagcaggtgtgtggttgttatccctgcctctgtccttggaccaggtggcaagtgttccaggcccactcaggagggagtcatgtcctgccccatatcccatctctccggcttactgggcccttgcagaaggtccagctcatctctctctctcatgtcctcctgctctcactgcacgctccgtctttattaaattgtcagttctctctgctacctagatggctggttacatcttcttctattattgatttttgtattgatatactctttgcatatgatataattcacccttttaaaatgtatcatccagtggttttcggtatagtcacaacattatgcaatcatcactactaattccacaatatttttatcacgttcaaaaagaattctgtactgattaattttcactccttatttcccactgtttccagcctcttacaaacacttacctactttcttaatggattttattctgaacatttagaataaatggctcatacaagaagtagtgttttgggtctggcttatttcacttggcataacgtttccaatgttcatctatgttgtggcatgtaccagtacttcattctattttgtggctgagtaatattccattgtatgcttatactatattttattcattcattcctcaatagatgaatatttatgttaggtccatttttttccattatgaatcatgctcctgtgaacatttgtgtacaagttttgtgtgggaatatgtttttcctggtacataaactaggtatggaattactgagtcatagggtaactccatgtttaactttctgaggaactctgcaactattttccatagtagttgcaccattttacttttcattttatgagtatttttatttgttcacagtcatacagacactttttgttgtcctttttttttttttttttttttttggtgtggagttgtctctgtcacccaggcaggagtgcactggcgtgatcttggctcactgcacgctctgcctcccaggttcacgccattctcctgcctcagcctcctgaggtgcccgccaccatgcccggctaatttttttgtatttttagtagagacggggtttcattgtgttagccaggatggtctcgatctcctgacctcatgatctgcccgcttcggcctcccaaagtgctgggattacaggcgtgagccaccatgccgggcccattttttcttaattacatctatcctaatgggtgtgaaagagtgtctgctagtagttttgatttgcatttccttaatgacaaataatcctgagaatcttttcatttgcttataggtcacatggatattttccttacagaaatttcttttcaagttcattccttatttctcagtgataggatttgaataaacacctttccaaaaaagtatacagatgatgaataagcacaagaatgatgctcaagatcactacacattaaatatctagaaacacataaagaactcttacaactcaacaataaaataagtaattaggttatttgtctttttgttgttatgttgtaagagctcatatatattctgaataggagactctcattagatatatgatttgcgattatattatataagttataggttgtctttccagttttttgatagtgttctttgaagcacaaaatgttttaattttgaagtaaaatttatgtattttttcttttgtcatttgtgcttttggtgtcatatctaagaaacaattgcttaatccagtgacacaaaggtttacacctattttttgagttttataattttatgtatcatatttacttcattgatttattttgattcaccttgttatatggtgtgaggtaaacattgtgataatgcattttatatgttaactttactggataaaggaatacccagatagctggtaatatattccttctgggtgtgtctgtgagaatgtttctgaaagaggttaggatttgaatcagtagactgttgtgatggttaatcttgagtatcaacttgattggattgaaggatgcaaagtatggttcctgggtgtgtctgtgagggtgttgccaaaggagattaccatttgagttagtggactgggagaagcagactcaccctcagtctgggtgggcaccatctaatcagctgccagaatgcatagaataaagcagacagaaaaatgtgaaaagacttgacttgcttctggagtttatctttctctcatgctggatgcttcctgccctcaaacatcagactccaagttcttcagcttttgaagctcaaaagagtctcagacttagaccagtggtttgccagaggttcctgggcctttggccacacactaaaggctgcactctcagcctccctacttttgaggttttggaacgcagactggcttccttgctcctcagcttgcagatggcctattgtgggagttcagcttgtgatcgtgagtcaatactccttaataagctccctttcatatatatatatatatatatatatatatatatatatatatatatatatcctactagttatctttctcttgagaaccctgactactaaaactgtgtaaagaaaagatctgccatcatctgtgtggacatgcatgcatcatcccacccaggtagaacaaaaaggcagaggaagggcaaattcagtctctctcttcttgaacggagacatcatctcctcttgttctcagacatcagagatcctggctctcgggcctccagactcaggctgagttacatcaatagcatttcttctgcttactgatggcatgtggtgggacttctcagcctccataatcacatgaacaaattcccataataaatcccctcttctgtatctatatgtatcctactgattccgtctctctgaagaaccttgactaatgcagaggtctaacttcattcttttgcatggaggtatttgacactccagtactattagttaagaaaaatattattcttatactgtaatgtcttgacatgggtcaaaataaattgagcaagaatgtattgatttatttctggaaactcaaatcatatgatctaacatgtgtatccttatgctagtagcatacagtcttgattataatagctatatagctctccaatataaatgataagatagttgttttcatgagttggaagacttaagattgttaaaatggcaatactttccaagttggtctacagattgaatgtcatttctattaatccctttgtcattttattcactatatatttttgaagacttgctttagtggtcactctgggaattgcaattaccatcttaacatattttttgtcactgttgcttaaaactaaacattttaaataacttaatgtggtaatgactggaatcagatgcttctccccacaccgcagcatttgttgctattgctatttgttgttgggttgttgttgttgttgttttgtgtagtaacttttctgaactaattatgtataagtctgtttgttgtttgtggccactgaaagttctgctcagttaacttagcttctacttagttagcttagtggtcatctaatgattagctagagatttcctaagatgtgtaaggaaccaataaacctcccagtttttgctgtcaggttctttgtgcatgttgagacatgcctcaacactcagtcatgtagtttacatctttgccttttcctttgcttcttgcttttacagaacttcaagattagccaaaggcaagaggaccgtctaaggtctttcatccttggacacatgcacagtcctgtgtatccagatgccattcaaaattctcaaaatgtattggagattttcaaacttcttatgaacatcttatttctaccttttatttttaagctttttggttagcatatattttgtccttactgttatacactgtcatcaacagctatgatattaaatgattgggtctgtgtattttcaaaagattcattctggaaacaactgtttacaccagtcaagctttgagtcatgtcaaataaaggtagctttgtggatgtggtctaatgaggatgttccatggtgagtgagcaggtaaatgaaagcctatgcccaaaagctgagggaactgagaggttgaagaaagagactgacaaatcctatatctgtgaaaaagctcttaatagcgacttacaaacagaaacaatatctctggtggccaacagatagtggatctctgcgcaacaccctccagagattatcctttatgaagcaagtgtttttggtaaaatgcatgcaaccggttatgtctcatactttcttatgaagccataaccacagagcaggttacacaagcaactttataagaggttgtctatgctatagacattgtttctttatgaggggctattgatgctacagaaacacatcttttttcacagtgattttgcttccagatggcatcattcttgccatgacacaagctgttttcctacaaagaagctgctggaaaaataaaataatggtaagaacctgggaatggtaattcaagggagttccaactcattctactctttccattggctgccagtctattgattttcactgtgattgtgggttattggtgttcaaggctaccaggaagctgggagaagagaacaggaattggagaagttaggacaaaacaatacaaatctctcttttcttactgagatgtagctactctcttgaataaacactcctgaattgacgcaagtctttgcttaatttctaggactccaaaatgtggattctgggagttttggctagtgttctagttgcttttaaggaggagataattttcacacattccacttcaccatttcgctgatgtcaccctccatttaattttaaaccactttaatcttgggtttctaacaataggtgctgagtctaatcttaaacaacagaaagacaaatggtaagaatgaataattatatatccgattgtgaaaataaaaaatgcataattcatatgagatcacagaatgttatgtaaattcctgtgcatgttttctgtcatatatatatatatatctgatatatatatatatatatatatatctgatatatatatatatatatatatatctgatatatatatatatatatatatatatatatatatacacacacacctatgatattaatactagaaattaaaggtttaatgcatatgttagctctcatgatcattagtggagatggctgaaatactacattgctgtctctgagtagggtctgatgtcccgcgtctaagtttcttctcttgtagttttgctagtacctagcagagtggaaattccagattcaattcaatggtgatgtaaaatttggcattctttattgtgtgtttgatgattttattttctgaattcaacaacaacagcaacaaaaggggaatcgaatttttcttgttattcactgaaagcttgtttttaagatgacatacttggatatttaacattttcaaatcatttattctaacatatttgtaaacagccacattaacaaaaacaggtgctactctcttatgataatatctgcttggggggtatatataagtggtctgtaccatatgtcagaggaaccatacaaatctagatagagttgcttttataaaatatcatctttcaaaaatgtcttataccctgggatagcatttatactgtataaatccatatggatgaaatctgagactcaattatcttccctttgggatcatttcaaacttcctacctaatatttgtgccatcattctatttttaaatattttaaaataataatatccgacttacaataaaagttgctaaaataatacaaatgattctcacacagctttcccaaatttcacacaaattgacatttcacacagttgttttattctctctctctttttctctcaatgtatatttttcttttctaatataaatgaagagaagtcacagacatggggccctgttagctctaaatacctcattgtatgtttcttaaaacaaggataatctcttatatagataaatatgattatcaaaatcagaaaatgtcacaccaatccatttttctgtttataattcaatatagcatcaaacgttgcatttaatggtcatgtctctgaaatactgtgcaggtctttagtcttgctttttccttcatgacctaaacacttatgaagaatacaagctagttactttgcagaatatttgttagtttgggtctgtttgatgtttcttcacagttaaattcaggttatatatttttggcaataatatcagagaaatgatgtgtatgtttctcagtatctcctagcaagaggcacaaactgtgaatttggcccatttctagtgatgtaaactttcattacttggttgaagtggtgtctgccaggtttcttcttgtaaagttaatgattttacctttgtagttaataatgtagagatgtttaaaaatgagagaagtattctaattttccttaaatttttgctcactcttttattatttattggtcatttttaataagaacagcattactgtggtgactcccaaattgtatgccattattgtttaaaggataaaatagtcacatatgttttattcacagtataaccaaacaaaataccatacaaacaaaaggtaggttaagctgatttattcattatactctattgctatttcacacattttaattggttttatgatttacgttcatggaccagtttacgtctttcaagtaggtttagaaaatttttcattcaaaaaataagtggatctaaaaagaacaagtaaaagcatttgacaatttaattctgacctaggattttatcttttcctttcaagctttaataatagttttgggtagtgcagtgttataatagagtctgtgtcgtttggtatcattgccataattaatttttacttagaacaagcaaaacagtcatcacattgtagatggtactcatagcatatccgaacagaaggaaggcagtgattgacaaaatgtttatgtgacagttacaatcaccatataaatacacatctgatgaacttgaaaattaacttgctgtgtggaactgaagtgcatatttttagaatatagcttcccctgctcatttcagctaaaaggagagtaaacacataaagctaacaaactaaaacaaacttattttctttttaaagtcacttttaacaactgatggctgggagaggtaaagaccagaacttctaaattccaatgacatgcaataagtgaaatatcttttttttttttaagaaacaaaggttaccatttggctttatagtattatttaatgatagcatttaaaaatatatttttatcttcttaaacttcagaaccagatatatggatacagtgtttgcctgatgtttgcagcagtgctggattccctacccttcttccctgctcttcccttgtgtttcccagaaactgatttcacttaatccctcatgattccaagaatactttctatccaaatttcttccaccctagttcagtttctccacctctaatccaatgaatgtcctttttctgattcacagaaaaaaaaaaaaaaaagcaaggccaggaaccaaaggcaagaaaaagcaaaaacaccctgcactagagggaaggtaccagggatactgccaaatcttacagatgaattccaccaacatctatagagttccaaaggattgaagtattgagtagagtttgctgtacatttcagtgtcaataaagaataaaaaatagctcttgtcatgctattatccccgaagtgagtgatagagtttggctgtgtccccacccaaatttcatcttgaattgtaacttccatcatccccacatgtcatgggagggacccagtgggaagtaattgaatcataggggcgggttttttcaatactgttcttatgatagtgaatacatctcatgagatctgatcattttataaagggcagttctcctgtacatgttctctttcctgccaccatgtgggacatgcctttgttcttccttcactttccgtgctgattgtgtgacctccccagctatgtggaactatgagtccactaaacctctttttcattataaattacccagtctcgggtatgtctttgttagcagtttgagaacagactaatactataaattggtatgggtagagtgggatgctactataagaatctccaaaaacgtgggagtgactttagaactgggtaacaggcagatgttggaacagtttggagggctaagaagatagtataatgtgggaaagtttggaacttcctagagacttggagtgctcagaagacaggcagatgtgggagagtttggaacttcctagagacttgttgaatggctttgtccaaaatgctgatagtgatgtgaacaataaagtccaaaatgatgtgatctcagatggagatgaggaacttgttgggaactggagcaaaagtgactcctcttatggtttaacaaacagactggaggcattttgctcctgccctagagatctgtagatctgtgaatttgagagagatgaattaaggtatttggcagaataaatttctaagtgacaaagcattcaaggggaagcagagcataaaagtttggaaaatttttagcataacaatccaatagaaaagaaaaccccattttctggggagagattcaagcctgcagcagaaatttgcataagtaacaaggaaccaaatgttaatcaccatgacaatgagaaaaatgtctccagggcatgtcagagaccttcatggcagctcctcccaacataggtctgagggctaggagagaataatggattcctgggccaggtccagggcccccctaaggacttggtatcctgtgtcccagccactccagctgtagctaaaaggggccaaagtacagcttggctgtggcttcagggaatgcaagctccaagctttgtcagctcctacatcgtgttgagtctgcaggcacacaaaagtcaagaattgagatttggaaacctccacttagatttcagaggatgtatggagatacctggatgtccaggcagaagtttgctacaggggtggggccctcattgaggacctctgctagggcagtgtggaagaggaatgtgggggggttggaggccccccacacagtctcccctgtgacactgcctactggagctgtgagaagagggccaccatcctctagaccccagaatggtagctccaccaacagcttgcaccgtgaacctggagaagctgcagacattcaacgccagcctgtgaaagtggcaggagggtgactgtaccctgcaaagccacaggggtggagcttcccaaggctgtgggagcctacctcttgcatcagcatgacctggatgtgagacatgaagtaaaaataggttattttggatctttaaaatttaatgactgtcctattggattttggacttgcatgggggcctgtagcccctttgttttggccaatttctcccatttggaatgggtatatttactcaatgcctctactccctttgtgtctaggaaggaaataacttacttttgattttacagtcttatagatggaagagacttgccttgtctcagatgagactttgggcttgaacatttgagttaatgctgaaatgggttcagaattttgaggactgttggggaggcatgattatgttttgaaatgtgaagacatgagatttgggaggggccgggggcagtatgatatggtttggctgtgtcccccccccaaatatcatcttgaattatagctctcataatccctacatgacatgggagggacctggtggaaggtaattgaataatgggggtgggctttttctgtcctgttctcatggtagtgaataattcttatgagatccaatgattttaaaaaaggcagttcccctgcacatgctctcttgcctgctaccatgtaagactccctttgcttctccttcacacttgccatgtgtggggcagattgtgaggcctccccatccacatggaaccgtgaggtcattaaccctctctttcctttataaattacccagtcttgggaatttcttcatagcagtatgaaaatggactaatacaatgagtttcaatatttttttactggaccatagataatgagaaatacatattttctacaacaatagcacataaatatttttagtcagttaaatttttacaaataaaatgtatagatttaataagttaaatattagatttaataagttaaatctataaaaaatgttgattttacaatctttatgtttatttcaaaatattcattagttcattgaattaaacatgagaagttgtgagacagttggaggaagcgtagaagtagaatgtgctttaaagtcaggaagatttgaattcaaagcttagttctgcaatttactactctggggccttaacgggacttcatgttcactccagccttagctttcacttatcttacaggcagatcgtggattttaacaaagtgaatacatgtaacagataataatccaagttttttcttttccctttacttttagactactttacactttgataagaaagactctaaagaaggtggctggtgctatgaactgaatgcttgtggccccccagtatctgtatgttgaaaccctatcaaggtgtttggaaatgtggctttcgaggtagttggattcaaatgaggtcatgagtctctgatggaactggtgcccttataaggggatgaagagaacagaatgctctttatcttatgaggatatagcaagaagagagccctctgaaaaccaggaagaggacacttaccacacacctaatagaccagcatctcagtcttggacttcccagcccccagaactataagaaataaatgtatgctgttaaaactacctagtatttgttatagcagcccaagctgactaagatatttgggaataaaccctttcagttatctgaatacagttctttgatctaacagaatttaggctctactttaagctctttgagaaaaaacaatgactcaattaaaataatagaataataaacattctctatttagattagcaaactcttcttgttcaaagtgtgtaaaatagagaacaacttctccaaacatagttttatttatttattcatttatttttgagacagagtctcactctgtcacccaggctggcatgcagtggcttgatcagggctcattgcagccttgacctcccaggctcaagtgagccttctgcctcagtcccccaagtagctggggcaacaggtatgcacaaccacgtcctgctaattgtttgtagttttagtagagaccaggttttgccatgttaccaaggctggtctttaactcctacactcaagggatccacccatcttagcatcccgaagtgctgagattgcaggcatgagccatcatgcccggatccctccagacatggttttaaccatgaatttttaagatattctctcataaaaagagatctatctttgtcatgcacataaacagaaaactgaaaaatcaaccctgtttcaaagggagaacagatttttaaaaagaaataaagtaagagtaaacagtatttatttattttaattagtttcagtggctgttgatggactgctattatatcccataagaaaaattgactagagactcaattcgtatgtgaacaataaattaacactattttaatatatttgctatgagatagaagggaaccaatctctcagccccttaaaattttactttgcatctttaacattgaaagacaatagaaaagaaatcattgctttacaaggttagcatcctgggtcattgtattaaaatcttagacagtagtgttcctggggtcacaggtcatttagcgcctcacatctcttaaatactttgaagggattatgtacaccattatgtaagattttttcatccatttcgaataattcagttttacatcatttaagccctccgttaattttggtgatgtacttctaaactttttcccaatgggtaaataaacttaattcagaaagaaattgtggtttggagttctagctttcagaatggtagctcccaagagaaaaattgttttggaaatggtaagaaaggatcaaccacctttaattctatcaggaatttaatcttgtaataagcctgaaaattccatttttgttaatagaaagagaatccgcatgaaatatagagagcaaaccgtttccactggcagcaaaaacaactacactgagtcatcacacactcagcatataaaattgatttaattatattgaggagaaggggggtgaaaatggactgaactagcacagtcagccaaatgcaaacaaagcacaaaactcaaattgtgttactgatggagaggtaacattctgtcaacactgtgctgtgcttttcatctttatgccattctcaggtgtcctcgctagtagcaatcccaaccagtcttatttaaaaatatatgtcccttgctgggcatcatgcctcatttatgatatggctttctttggaaggatacttcaattttccttacaaggaaaaccaataaaagaattcaataagtgacttgaacattgtattggctcaccccttaatggtcttagaaatccatttttctatatcaatctgtagcatcctccacctctgagtccagtgttacttcaccagatgcaaatagagatcaacactcactggttttccttagggtccaggttgttctctggattatcgctaaagaaatctattacactgagagtgaatcaggtatgtttctcacagaaaggcagcatggcactgagaggtaagtctggactggaatcaggagacctggaacttcctgccagtcctgctaccatggtgaataattcacttctgtttgcaaagctttctgagtgacctttccatacttacaaatttctcatctgcaaaataaaagggtccttgggaaaattgacagagttctcacagtgctacaattctatgaatttaacctggtttatttgatttataaataagtaaaatcagtttaaagccattagaaatgacattcctaaatgcgattcattaagcatccacaaattatctaaagcaatggttagtataacaaaaaaagcctgtattttaaattatagtgttttttaggttattattataaaaaataattgtatagaccaaaaacatacagccaggttcaaaatattacactgaaaaccctttagtaatatttttcaaaaatattatactaggagtttatatattttcctaacacctaaggaaatgagtattaaataaaacatgaaaattcatcaatattatttctcacttcgtgggttatctgaatgatataaaccatgaagcaataagtaatattggttttgaatttttacctttcttgctaatgttctatatgaataccaaaattttctttaattgtaagattataataatgttcaatagctaatccaaactcatgtgtgtagttttagtttcctcttagatttaggattatatttaatgtgattctgtttgtctggcagtgtttccattattttggcagctggcaaggaggattggttatacgaagcttttctattttccctgcaatttccaacttggctccaacttttagtaatcgtatttttgcttccgtttaaaggaactgtatgcagaatgtcatttattaggtaaccacttatctgtgaaaaaatcctacttattctatttttgacaaagtgataaagatagctttgcagtgaaatgctgagtaacaagcaaatcagactgcaacatagactcgggaaaaaaaaatctctgctaaaaaaagtcaaatccatctaccctttgagggttaaaaagaaaagcatttctaccaacgatactaaagttaaaaaaacgtagaatttatgatgttttccctttaaaactagagaacaaataatttatgactgctacaggcctatattttcatttcagtggaatcttagtgtcccctactggtattcaaaaaatgtaaaatattaataatattttctggttttctttttagagaagtattttctattatagcaacatggaaatcttccaaaagcattgttttattaacctgacctttgtaaagttgagaatgaatgtgagtttaggttctacctttaggcagatttttgaaacctaactgaagctgccagttaaacgcaaagcaatattttttaaagttaactgatctgcagggtttgaattgagttgtttctgaaccataaggtaaacaagtgatgtattttctttcattctctccttttgtaagtttaatttttgtcaaagtagtataaaaatgaattcaaatgtaattatagccttttggtagcctctaggactatagagtttttaaaaacaaaacagtccattgatttttttccacctgtcattcctgctttccagaggccacagagttcaagtcctctagctatattcttaaaaatctgcctttttatttctaaaaaaatcaagtttatgcttccatttctctcttgttgttttcaaattagccacttcttttgactccctacaatgaaagataagaattaagctttttaccaaaaacacacacacttacagggagtcacatccctccccacatatcacacacaaccttaaaatatcagtcacagctgatcccttattatataattattgcatataatttcctatgtacacttgcttgtcctgaaaactgaaatagcccttaatccttttcttttatatagccatcattaaacactagtatatttcatgtatacatatttatgcacagacttttttacatattaataacagtcatacattctttgaagtcaaaataaaatgattgggttaatgcgtttagtgaatttacagagggaagacagtatctctattttctgagccccagactagattccagagaccaacctagttgctagaattctgccactgactacctgtggaagcttgggtatgtcattttacctctccatgcctccaatttttcatccgcaaaataaaaacattggcctatactttctaaagttctctgacacaattctaatataaaatattatatgacattatgttaaatataatatgtttgatgatattatatacacataatatagatttaaaaatttgaatagggaaactcaaaagagactgataaggcttatttgtgtccagttctactagtgaatactagtatttcctgtgagttggattgtttatatgcagtgcatactttattttacattctaaaagcctagaagatggctttcaaactttaactttcatccatttattctacctggggtcattattaaaatgatgattctaattcagtggatctgagaacaggcctgagatactgcttttctaataggttttgcagtctcacttagagcagaaagggcctacagtttaatttcagctggacccacctagagaacaaacctgcagaacttcctccagtgtgtaggccaccaaattcctcaacacagcaagggttgtattgaagaattaggtattcttactaggtacagcaaattatgtaatgagattttgttaccaagtattaatgtgaagtatatttcttcaatttatgtagtctttatggtagaaattgccaatgccattcctgtagaatatatttagctgtgtataatattatctttcaaatcaatggagaccaatctatttatcagcccttcataggactccaagccatcaaagaagacgatacgatgctcacagagccatgaatttataagttagcaatatgtgtctagattatttgcaaagcatttctaattagactattcattccttttatttttttaagtaatgtttgaattcctcgtcagcccagatttcaccattatgcagtatatgcatgtaacaaaacggcacttgtactccttaaatgtatacaaataaaaataataacaatttatctttaaattctaccataaaactacataaattgaagaaatatatttaacattaatacttgttaacaaaatatcattacataatttgctgtgcatagtaaggaaaacattcttatataaattatctcatctcaaagaaatggcctccaaacaaaaacaaacaaacagaaaaagaattctggcaatttctcaaacacctttcatactgccagaatagtctgctgtgaacaatttgtcccagcagcactccatcagaaagcactgtattgcatcagtaacacttctttctgtagtttatcaggaaagaccatgaaagagagtacttttaattattttttcgattcaaccgacctgctttctaagaccatgtccataaatcattgtatttgacctctgcaacctcatctcaccacaccagaggaggaaataggcctccactctttcctcaagaaatcacgagaatcaaagtcaatttccttttgaactctccttctaaggcgtcagaagaagtaatcatcttcttacaatccctcccaccacctcctttttaatgctgaccagaaacctgaataaactcacatttgacaccccccgccacaaaatgcctcttctcatacagaatttaatggacactccgaccttcagaagaaagtggtcctgattaaatcaattaaatatgttcccttccacgtaaaatgtgctagcaaatggttgttatttttttttaatcttctcaagaagaaggagaatgagattcattttttattgagtgtctagtaagacactgggccagccttgaagatagaggaatgagggagagagataccatccctgccccatcctgaacttctggacacacaattcattagtggccaagctcagactaaaatcagaagccccagatgcttggcctttaactttgcttcctgacaccaaattacctaacaaaaagtatttctaatgtactgagtctcaattcttgtgagaggtggaatgaaccgtggagccctataaaataatctttgacccctacagctcatcgaagtttaggtccaggtttctgtgtttttaaatgtctgcaaaggagtttctccaagtagaaggtttacatgttaccagctggtgttttctccagatattgtttgtgtactcacttaggtattaaaaaatggttggaggaaattaaaacaaaaatatggtttataaaatagcttaactaaatttgttggtagtctgaaatcaaaatgttgcggtacatttctgtaggtgtataatttattgctgaaaataccttttccataaaatgcctagttggctgtcattcttcctttctctctgtttactgagtaaatggaataaaattatgagatcagctccaaactatgttccagatctaaacttgtatgtttaaccatagaaggatcaatgcttactcaaagctaaaagtctagactatttgtgatccgaaagtttactgggttcaggaaactatcgaagtggcagatgggagtttcatattgttttctggaaagatacaggaaagaatgaggtttgtagccaacatacattaatacaaccagctctgattctacttgctgtggcattgtatacattccctaaaatcctttaaggatttcaatctccaggtttaagtaagataagtctcaaagagcatttgatggcagattattttatttcatacatgttgaaactaataaacaaaagtagagaaaatgtcacctacatattattaacataatacacaagaaactgcctaaggtcgtaggtagtttaacaggttaagcaaagtggaattacaaaataatattttgattttcttctagtttttaatttctaaacagaattagctggttcttttgtataacattaaatataatccatataataaagaatatttcattattgataatttttgttaaagtttaattttcaaggcaaacacagtgtatcagaatagtgagccctcttccataaaagcactgtggaatagatatttagtttttcttgttgccataaacatttcttcaaggatttgtatctaactttattacatttgaaaatataattgtattgataaactatatattttttatttaatatgtcaaaaacatttgaggcatattgaagtatagcatccatcacaaagaaaaacatctactgttcaattaacagaaagtggtttagaacgtagacccagacataggtcatatagattttggtcaaattttaactcagctctgagctaaagacctggtatgtgtctttaggaatgttacttaatcttagctcactgcagccttaaacttctgggctcaggcggtcctcctgcctcatcatcttcctcagtagctgggactgcatgtgtgtgccaccatgcacagctgatccttctctttctatgaagataaggttaacatcaattaattataggtattattctaatcgttattttaaacagtggcttagttggcataaattttttttggaagtaaataaaaatgatactttcaagtagattttaacgttaaagtctttaaagatttatcctcctgttcaacctgtaaagtctactcacttgattatatacccaagtcagaagttctgggacttggaatgtgcttgttttggaatgtttttaatctgattttttaaaaaaatacagtttatttctcaaaatttctaaatgatttgttttcctaggttgatagagtttattaattttgacatttagagttttctttccagaatttttagcttttaagtagatattatctgcataaaaatgtgtttctggctttcaccttttctagagttacaagctaagacatttctacataccagccagtaagaaagtctaaaaagactactcgaaaataaggcacatgtctcctggcaaaaccaaattttaaaggggtttggaaaattggaaggggatttgtaaagctgacctatcaccggctgccacttatgtgggaggtggagggcaggctattatagcattccttaaggaaattcacaagtattgcaatcaggacctgtccattagtagtaaagactgagtatttccaactgggtgctcacatatcccaatacaatcttaaaataaacccattacaaatctcaagcaagaaaacgcaacatttgtagcatctaaatatgagttttattaagtaaagagcaggtaacatttaaaaagaatcttaccaaattaagtttaaagaacatcatatagagacccatgttggtattactgaaaagtaagatatttatgtcactgcgccaatagagtattccatcttggctgacataggcgaaaatgacttgcaaacccgccaaaaactgggagattgagacaaaaggactagaagagaaaaaaacagaatgtagtcagaaaatctcatggagaatagtgaattacaccttgagactttgcatcatagagctcataaaatgaaaactgtacattgatttttttctcttggttcagctagagagatactatatcaaacatttctaaaaataacactttccactggttttatcttattaaactgaaaataaagcagtgtttcagtaaggttgttgtaaacatgcattaaagctattgtttgtcaacagaggaaggaactgaaaaaaattacagcactccctctaaattatttaccataattacaacattaactataatgaacataatgcacagttgaaagacaactggtataaatatggctaaaatgcccaattcattgaataattcatttttctcataaatataatatcatgattcctggtcgttgaaaaatttatatttcataactataatagaatgttgatagattgggtaagacctgagagaattttaagatcctgtcattaaatcgatatcctcagtaacagaattttctgaccaaatattactagataaaatgcacacctcaatcataattttactcggcagattggaaatatgagagttcaaacaagaatcaattcagttccattttcttctcaaaaaagtgtataagggactaagcaagatcattggttccaagtgaatacccaaactactttagcaggcattcctgcttagacacttttacttcttgcggcacgttatcagtctctttacactatcaccccttaggagtctggagtcattctgtgagaattcttatctccctttgttcaagcttactttttcgagaaatattcttggatgatactgaataaaaagagcagttctcagtaatctctcatttctaacaactttggggataagtccagggtattagttgtaaatacaacacagaaaaccaaatatctcaagtaggaatgaagcctctgagtcagacaaatctctttgagattgaagacaagcgtgagactattatattcccagattcttcttgtaaaaaatgaggataatcatgacacctatttcataagatcgttagaattgtgggaatgtatgggaaattctaaatcctatgtatgatatgtaataaatacacatttaaacgcatgcttccacctgccttgctgccattgttatcacatctggaagagcacaggggtcagttttcatgacgtagtagaaaactggtgttaaatatcttgaaaaaataattaatgtggcaagaagttgactgagagacaatattatatataatatttgagacaaattacagaggaaaagggcaaactgtagaaaaagccatatatatatgaaatatataaaaagccatatatataactaaaatataaatagccatatatatataaaatctccagaaaataatcatttcagcctcagattataggccttctgggcaaattaaaacctagagaatctaagggaaaaaggcacttgatgaggacggaagacatactaagttagaagaacatgttatgttactgatactctgttacttgttaaattatcttcatgttaaaagaagaaggttaatggaagaggacacaacacattctgaaagtctagaaaatcgaatttgcctacctgtctttgacaacagaagttttaatacagtcaacaaggcagtaatacctcaatcttgcacatactctggattctacagtgactcctgtgtccagagcgatatcagactgacacaaagcactctacctttaagaattgtagattgtgtaaatgctaatttgtacttgtatcattttttattcaccaacactcttgaaagctaagaatagcacatgatacataataactactcagtataatgggttaaataaattgacagaaaatacatacaaatccaaatatcattgtatattttattaaaatagcaaagctgtatctatctttgaccttttttcagcaatttatccttggggatataggcttcaaaaactcttagaagctcaggaacaaaagtgataaatgggaaatataatgctaaaattgattggagaaccatcaggagagcgagatatgctttgtcttttcaattgtgagaattagtgctggatagcagagtgcagagtatatcgaatactaaaaacatggttttacctatgtagttgaattggcttggttttcctactctcatggtactgtatctatattactcactcattagttttcacctctgactctttgtttccattcattaatttaatacatcaaatggaaaattgagtaagtaggggttttccccctcatgttgtgtgtgtatcacattattctttcatatggcatgtgggtacatatacacacacacatacctatataaagtgagagagagagagagaaagtaagaaaaatgaaagaaagacaaagaaagacaaagaaagaaagaaagaaagaaagacaaagaaagaaagaaagaaagagtgagttgaggacactttgaaagatgaggatgagaaatatgcctaggtgacattcatttatacgggtttttctgaagaaactcgataatttacaatgcaagattcatccagtactaaagcctaaagatatgtttttattggcttcagactttccaggacagatttcagattttcaaaagcccctggaaattgggaagggaaacccgttaaaggaggtcatgtggagagggggagataaaatctgtatataaactttatggaaatattgattatactcagaagtaaagactcatgtaaagggcattaaagagcttagtggaaaatcaaagaagaaaaacctaaagtggtgaacaaatatttaaactgctggtcaatacagagaagagagtttgcagtttgagtcatgccaactgaagcagactccataaataactaagccttcccatccacacataagaattgctatatcttaaggttaaataaaacatccagtagcagaggaattaatcctaagagtaaaacagaatagtgttgttagaacatagtataaaaccaagcctacaaaacctcagtatgatcagctggtaacgtatttgcacaatcaaatgaataaatcctcttctaaagatgtaaactaaaccaaaacctatggaaacagactatgcacaatatctagtatattataaaaattagtagacataccaggaaggaagaaaatatgactaactgtcaagaccaaaaaacagtcaataaaaacagaccctgagcttgttcaaaggtcaaatttaaaataaggtcttaacacattcacttttgacatcttcgagaacttaaggacaaaaaatatcataatgaccaaatacatgggtaggtacttcaacctcaaagaagaaatttaaaatagaaacaaatagatattataaaattaaaaatattatatctgaaaaacaaaaacaggatggcttagccattcaccctgtagatagttaaaagatgtcattttaattgaagaacaacaacaaaaaaaaatggaaagcataatgagtaggtctttcactacttgtaagacaatgtccaattttctaatgtaagtgtaaatggtcctttaaggagtggaaaaagagattgtccaggaaaaatagtatagttgaataaaaaaattgcaaactgtctaaattttataacaatattaaaccaaaaatacaagaagtttgataattctcaagaaatgtatcagaaagtaaacaaaataaaaagtagttagttatatcatattcaaatttctaaaaacaaaaagaaaagataaaacctgaatgtcaccaaaataaaaatagcagattacttacaggggagcaacaatatgaattatagccagtgtctcctcagaaaaaatggtgtaagaaaacaatagaaaaataagtctctcaactaacaaatatatatagacagaaaatattcttgaaacataaatgaaaaatagagatttttttttttcaaataaagccaagaggagacccatactatagaaaatgtcaaaggaaatcttacattgagaacaaatggcataagatgggaattagaatgggcatgaagtattgaacatggaaaacaaaataaaaatagcagaaaagagaaaagggacatattgaattatactaatgcaataactgttaataaataaataaataaataatatcaagtagtatagctgaaaagctaatagaggaatcaaaatagaacagtaaaatagttaatacacccaaaagaaagaaggaagaagatttaaaaaaattaataagtagaagacaaatagaaaataaatagcaaacggatttgagagaagatggcagataggagacaaaaatgacatgcagctcccatctggatggacagaatagcaaggggagactcacactatggacttttgctccaggaaccaccacagaagtgtaccaagaaaaccaaaacaaattacaatttctttcaaagaaatggcagcctgctgcaaattcctcaagacagacaaaaaactctggtgctctcttgaatgtgtcacctcttggctggagaccagccaactcaggacattacagcaactcaggacagaacaaccatgctccaaggaaggagaaaacaacagttaattccactgcctgcaacatcctggctaaacagttgtcctgagtctgcccatgtgacaagttcactgcaagaataactggcattcaagaaagccaaaacacgagcatatctaaaatcaaggactctcacagagtctactgcactcccctgttatctccaacagagcaggtgctagtatccatggctgggagacctgaagatggattgcatcatagtactatttgcagacattcctcagtaccagcccagagctttgtagccccactgggtggctaaaccgagaagaggaataataatcattgcagtctggctcaaaggaagccccatccctaggggaagggggagtgcatcacatccagggatcaccttgtgggacaaaagaatctggacagcagcccttgagttccagatttttccactgaaagagcctattcaaatgagaaggaataagaaaagtaattctggcaataagacaaaatgagattctatagcacccccaaaagaccacactagctccccagcaatggatccaaaccaagaagaaatctcttaattaccagataaagaattcagaaggctgattattgagctactcaaggagatatcagagaaaagtgagatccaacttaaataaataaaaaaaaatacagttgtggatcaaaaatgctccagagaattagatttagaaaaagcaacaataacttctggaaatgaaaggcacatttatagaagtgcataatgcactgaaaagtttcagcgatagaattgaacaagcagaagaaagaacttcagagcttgaagataggcttttgaagtaactcaatcagacaaagacaaagaaaaaagaataaaaaaatgtacaaagcctccaagaagtttgagattatgttaaatggccaaacctcagaataatttgtattcctgaggaagaagataaatctaaaagtttggaaaatgtatttgagaggctatgaggaaaactgccctggccttcctagagatctggacatccaaatacaagaagctcaaagaacacctgagaaattcattgcaaaaaggtaatcacccaggtacacagtcatcaagttacctaaagtcagacaaaggaaataatcttaagaactgtgcagcaaaagcatcaggtaacctacaaaggaaaacctatcatattgacagcagatttctcagcagaaacactagaaatgggaaagaactggggttctatctttagcctcctcgaacaaaatatttgccagccaagaattgtgtatccagcagaactaagcttcatcagcaaaagggaaaaaaagtctttttcagacaacaacaataaaaaaaaaacacgctgagacaattcaccactaccaagccagcactacaagaaatgctaaaacgtgttctaaatcttgaaggaaaacctaggaattcaacaaaatagaactgccttaaaccataaatctcacaggacttataaaacaatgacacaaaggaaaaaaaaaaggcattcaggcaacaactagcatgatgaataacaatacctcacatctcaatactaatgttgaatgtaaatcacctgataattttaccagggaggtatgctactataagatgtgtgtgtacctcaaagtagagcttaaccatcattgaggcaaagtagaaacaactaaagggaaaattagttcacactcatagttgaatattttacacccaattttcagtaattgatgaaactactagatacaaatattaataaacatataaactatttaaatgacactgtttctcaaattacttaaattaaaatttatgaacactatacccagcttttcagaattcacatgggaatttcaccaaagtagaccaatttttgaggcatattatgacttaatgaattaaaaagaaagaaatactccatacattttcactgaccatgtgaaattaataacaacagcaaaaaaacaattagaacagatccaaatatttggatattttaaatgacctatgattcaaagaagaaattacaaaggatattagaaaatgtgaatgaaatgaattaacaacatattaaaatttatggaatatttccactgccttaaatatgtggctttaaagttttataatatagaataagaaaggtttaaaatcactgaactaagtaagttttcaccttcaaaaacttgaaaatgagaaaattaaacatgaagtaagaataaagaagaaaataataaagagcagaaatcaatgaaacaaaagtgaactataagcaaaatttattcaaaaaacgtaaaagctgataaggagaataaggatatacaatgaaataataaataccaagaatgaaagaggtaggaagggtagaattcattccaaaattaaaataatattattaaaaatatgaaaaaagtatgctaattccacaacttagataacattgattaattactgaaaaacagaacatatcaagactatcacacaaaaaaatagaaaatcagaataagactatatccattaaaaaattaaaattatttaaaaaaacataaacaaaaacatctccgtagccacatgacatcagatgtaattatgtggttaatttaagaaagtaatgttgaggctgggcacagtggctcacgcctgtaattccagcactttgggaggctgaggcagttggatcatgaggtcaggagtttgagaccagcctgaccaacatggcaaaaccccgtctctactaaaaatacaaaaattagccaggtgtagtggggggcacctgtaatcccagctactcaggaggctgaggcaggagaatcgcttgtacctgggagatggaggttgcagtgagccgagatcccttcaaagctgtatctacattattgcttgattgaataaccaaggaatgggaattttgggcttgtgaattatacttttctagagaggcatgagggagccgtggaaagaactctattactgggcctgaggaaatcatggaaaggaagtgtaaaaggtatcattatatcagacagatagaatattccaagtgtgaaagcagtaaaatatatctaataaacacagtctcaacaaaaaaatgcttataattagtataccaatatcaatatatctcacactttaaaaaaatacttcttcagaaaactctaaagaagttatgtatcccatgacctggtaaatgatgactcaactataatagcaatttcttatacttatgtagcattttatattttttatatcaaatttggaatcgtgtaacctttaaactttttaaaatctttacaaatttatatatttttaaattaatccttcctttgccttgaaaataagacaaccaaaggagatatatctcacaaccaagaaaagaataaaccacgtattatgagtacaattcaagttatttaacattagccagatgttcgcatgcggtgtgctagatatatcttcattaaaacaagaatattaagttttataacatacttcaagctgacctgtgttgtatataaccaaaacatataagatgattcaatctttggaagatataaatgtggatatcacagtgaaacaagttaatggacaatatcatggggcaagaggctcttccagggtcattccttcctaacagaaaatattttaaatatttgtgttttaaaacttaaacaatttttggttctgcattgttttcaaaattgttctattgatttatgaccattgagataatattatttcagctatacattttttaataaccaaaaaaacaaaacatttaggggaatcctgaatctagtttgagattgtggtgtaagcacaaaaatatgagcagttactggatgacagaagggagttctctatgaaagtatttggatctttaactaaatgagctaggatagactgttggagtcctcatctctactcataatatctggctaccctggcatttagcttagcaaggtaaaggcatacaaggctggtaaataaactagacttggaagcttgagaagcaaaaacaaacaaataggatgaaataattataaagaaaacagtatctcatttccaatgccaaccaagaaaaaaattatttaaaaaaatggaatgaataaaatgtgagaagttttgacagaataataaataattaaaatgtggtgtatcttccactctgcacatagttttttttgtaaaacaaggggagcaggtggtgtgagagagaattgtgtacagcaaggaataaaaggacacccagcataagggttgcttccagcagatttatacaagaaaataaattgtggaaagaatgtcattataattgcttaaaaatactttgcaattttgcttttccattctccttttcctatttctactgccacccatttcacctctcataacaacgtctttactagcttttgcttttattacgtgcgacataagctagggaagaatagtggaaatgactatatgaatgaaaaaaagacatctatattttgaccaagggtgacatcattctccatattccaactggatatgattccaaaggcagacagtaaaaagaagaagaatgagacttaaccgaagtatgaaataaagaggagatgtcaactgtagtttctgttcaacaagggctgaaagtagattcttttaaacaaaatgtgaggcattttatcaaacaagccatttctatttttgaccgaactctataaataacaatgtaaagcaaaagtgctctttaagtataatgtagtagattggaaaatactaaaaatctaaaggtatattctaaaactaccattatatagacttactcatatgtagttaatattttgaattctgcactctacaactaacattaacttggaaatgtttgtatctgtaaaccacacacttgtttttaatgagtctagtttcaaagcaaaactgttctctctttcaaattatgattttaggaagtagtgtaatttagtggtgattcttaaaggagttaaggacaattgagcttatactttagtgtcataccacttactagcttggacacacatgtgccacaggtttcctatctataagagaaagtaagctgggtatataagctaaataacatatggatcaggaactgttctgaaaaactgaatatacagtgatgaacaagaaagacaatgtgcttagactagaaacctaaattctcataagtggataaaacaacaaataaatgaccaagatagattgtatggtgtggcatctgttatgaggtaaataaaaaagacagtttgttaaaagtgactctgtgaggaagatgtttttaattgggtggttctggagtgcctcaatgagtaggtgacgattgtaatgttcctaaatggttaggaatctaggatctaaagaagacctttcctggtagatgaaacataatagaaaggccctagggtatacatttgcttcattggtaggaagagaaagaaggctgtggtcgtccgaggaaagtaagtcattaagtaagtcattaagaaaatggcgtgcaatagaaatggtggaaacaaagaatggttcagatcacagaaggccttggggactgtaatggatgccattggcttacccttttatattcattatctactctgtcatgtgctttatgtattcagaaatgtaaactgtataaattgctgcagtgggttgatttatttttggttttgctgttgggtttggcaaataggtgaccccaggaggatatccagaaattaagaagaaaaagaggtgttagtactacttcactatgactacggtctgaatatttgtatacctacaaatttgtatgttgaaatcctaacacccagtgtaatcatggcagaaggtagggcttttggaatgtaataaggttatgatggtatagtcctcatgaacgggattagtgccttagaagcctaagagacacctcttaccccttccaccatgggagggtccagcaagaaggcactgtctatggaccagaaagttgaccctcatgagacactgcgtctgccacctccttgatctcgtacttctcaggctctagaactctgagaaatagattttgtgatgtataggccacccagtttatgctgttttgttatagaagcctgaatggactgagacacatattgattcaccctggagcaacaggatccctctatagaaagccccaactcctatgaggtagacctgtccagacagctactctttctggacactgtaacaaatcacaacccttcaatcataggcttggtgaagtctccctcctgttgcaggcctgaagccctgtactactccctgctggctcacctaaactctgactacatctacaacaataatcccattatttagttatctttaatttgccaagtttcaatgggctctctatttcctgccgggactctatctgatgaaaacataatagtaaggatttggtttaattataacatgcatattacatgcaaaatgcctcatgtcattactcacaattagaaaacttaatgcattctcaatgacactatgggaaacagtgctacatttgccatcctctctcttgatctctttaccagtgaccaacagtggacagaccaggagattgtatttgtagccttcaaatagcacaaacttgaatattttctagtaaatttcctgattcttctcttgcgatctcctgacttctgaaaaggcagaatgacctatcaggaataccacagatactaatgggcaggttgcaggtagtcttaagaaaatttccaggctgggcgtagtggctcacacctgtaatcccagcacttttgaggtccagagtttgagatcagcctgaccaacatggtgaaaccctgtctctactgaaaatacaaaaattagctgggcatgggggtgcatgcctgtagtccaagctgcttggggatgggggggctgaagcatgagaatcacttgaacccagaggcagaagttgcagtgagccgagattgcaccactacactccagcctgggcgacagagtaagactctgtctaaaaaaaaaaaaaaaaaaatttccaatccacacccctgcaagaaatggaagatgataaagaggggaaaatgcataattaattttgctctcgtaagaatctccttaaaaatctatatgaacaggcaaaaaaggcattgattgtctgaaaaattggaagggattttgcaaaatgaactgcttgcatgcttgaattttttacacctaaagtatttcttgctttaaatcattgttaagtcttagtttctgctcctaaaataaggaaatattgaatattttaagacaaaacatccaatctaagtatatgctgttcatttaagaaaaacacagtttctcttgagatggctcagacctgctagttttttttaagcaaaatagataaatagaaagatattcaatccaagtttaggtttagtgcaaacacagataaaacgcttgagttattctccaaagctctagcaatttcttcccataaaactacatcaacataatacattctgtgtttacacaggtaaacagaagcagaggtttgaacaagaatctggtgattttgatcagcataaacatccaggaactgaattatctgaatagctgagatcaaaatctccctctttctttcacatcaggtttccatttatttatttagaacatttagctgatgattaaggacacaagatttggggaaagaggggtttgaattttttaaaattaatttgtgtacaaagggaatataaagacttaaactttgttgggtattcaccagataagagcatttagccctgacttaagaaatgtaaatcaaatctccacatcacacaggagaaagttgacaattataaaagaaaataaaataatgcagtattttcactaggtccacattttcaagttgttttaagataatactatttattttcataaaacaggaggttcctttgtcaacgaattcaacaaagctgtaagcaaagccaatggaagaatatgtcagatactgagtttatgacaggtaagttgtttgcttttggaggtggttgtagatgttgctgtcttaattagtattgagggaaatgagaaggcttaagatactttatccatttagaggttcaaggtacctaggcccaaatattccaatgaaccacattttttttttttttttgagacaggagtcttgctctgttgcccaggctggagtgcagtggtgcgatatcggccaataaaccacatttttgcattcaactacatgaaatgttgattaaagtcttcgagaataaacaatagcatcagcagcaacaacaaccatgaaatatttccttctcatttctaacagttatgactacactaggatttctctgtttataaatctttcctttttgggctatcaagtagtctaatcactctcagtcttaagctttatttgtttttactcagccattggttaattggttcactcaacaaacacagttgtgagatgcctactaaacgtcaaggtaatactaaataatgagaatatacagatttataacacagagacatcatttctactatggagggggttaacattctttaattattaaccactagtatggtagtaaaaagaaaataaaattcaaccgttactttacagttacattaggatttcaagttatttttggttagaaattaaaacaatcatgaggcatttaactggaacttttatatttaaattagtattttctaacctatttctactagcgtttttgttttttactaatgataaagaggaccattataaactggagggattcagatgtcacaacgttattataaggtttgacttactgtaaaatttccttacctggaaggtttaagtcaattacagccctgcagggggagtcttcattattacaaaaggaacttgagaagggtatttatttgttcttctgaacaagggcaccaatatacatattttgcttacaaatggtaggtttgtaattaggtctcttctagtatgaactaaacttgaaccttcttattttgcctaagtgttctctaaattacatgtgtactttgatttttagtaatttacttcattgtctctcaagacactactagtgcttatgattaccttttttagcaattgatgatccttaataactgattttctaagtggaatacttaaaaattctcacaataaatttttaaagtataaaagcaacaacatttctgatatacaggctcttctttagctgcagggtgtgtgtaaaactcagtaatcttatcttggtatggatttgacttcctgtagattaactgtactttaatctgcttatgttctgattctcatatttttcactattccttctgatacagttaaacaagcttagggtgcaaagcttacagtgctatccctgagacagcaaattaagtaattactaatcaaaagaagaagatgaaaggagagatagataagtcattagcattgattttaactagcaattctaggccaccataagtcaaagagtgagttcttggagagaaagatatggacgctccatcccagaaacatagcagaaagtgggattttggggaaaaggaatgagaccccaatcttctaggttgttcaacccataactatagtaagtagagcaccagataacctagactcttgcttcccttatgtaaagtttcatactcaaatctagatgccccataaggtgcaacatcagatctgcacctttgattatagcctcctttattctcatactgattccattcagattaatatctgctgtatgcatatttatataatgacataaatattgactctagtaaagaagaaaatcagatttttaattaaatgattaatgctagtaataaaatatttgtcttttatttaaagttgtacacaaatgttgataaaatagttagcttttaagctttctcctgtctccacaagccaaaagctttagaaggctgaagaatttaaatatcatttttaaaagctagtatatgttccagaatttatttataaaaagattttgttgttttgtgcatcacttcacagaaaaattaacgtcattggagttactaagtcaatgattcttggtagtataaatggatttttgtggcaaccgatataaatttacataggaaggactgcagaaagctcgaggaaaaaccaacaccagaaaaaaaaaaaaaaaaaagcagaaaagccaaaatttctctcccaggagaagccatgtgctattagtagcaatgtagcaatgccaagtttgtgaaaattagggttttgacaaatccaatgctagtggaccttgactgatttttctgttttgacaaatagcataagtcatttgaatgaagctaattctgctgacaaaaattatggatttattttttctgtcattgtacgttgctcacaggataaaaaaaaaaaactactaataaattcattatgttgcatttctaagccttgagaatatcctgacttctttctattttgtttttgcttgaatatttcaaatgttgattgcaaaaacgccccctgctgaccacagctccccgttatgcatgctgtttgtacatgtcattgcagctcttcccatttagaggtggacttgctttctctatcccctgaatcagagctggccttgtgacttgatttggacaatagaatgcagggcagtcatggtgtggcattctgagcctagttctccagaaagctggcatgctgccactctcttggaatgctgcccttttgccttggactggccagctgtaggattagagactacaatgagcagagctgatgcatctcagctaaggtcatcttagaccagccagttcccactgactcatctccaacatcagccaaatatgacctagatctgcagagccttccaaagatcagtctcatgagaaagaataaaatgataatagttttaaaactctaagataccggtgtttggttacaaaaaataattaaaaatttgaaatgaactgctgactgtcatggtattaaatctcacatatttatttaacaaatatttactaaaattcgccaagtgcctagaactctgcaaggcactccagaggaaataaaaattatatgaaaacaagactttgacccaattaacataattcttgaggagaacaacactgcatgccctacgcaagtcttgaatatttatgtacacttcaaattttcctgattcatgacaattctctcatttttaatctaggaataccaccaagactttctgacttccaaggggctttagaaatattcaaatcttcagaggaatcacttcatggtagtcaaattctagaaaacaatgtatatccttgcgttaggactaaattaaaataattaattaagacataaatataactaaagttccttttaaaagtcctgctcttaagtaaaattatgttaatattaccctgcactaaaatatgaaaaaataaagttattcatagcttattatattatttactgttttaatctttctgttatggttgtttgaatgttaaatttgatgcctttgttttatcattgtaccaagaatgatagttctcaatataaagtgaaagctgcaaaaaaaaaaaaaaagtaagcctttttgttttttccgacaggaaattactttcacacaggcagacttactagattaaccattcatggctacccacttaaatggaaagagacccacagtagcagattgtggatcgttctacaacatctttagcgtaaacttaaaggcaaaaggaattagtcttgacaaacccctaaactggtcaagtagaaaaatgcccctgatagaaacttccctcactatgttgtgttattagtgaaaagaggacaagggagtaaaacaatgttaagaaggaggaagaaaagagtgcatataccataaagagcaggcaagtgaaccacaaatgaggcttctccatttagcccagttcctcctttttaagcactactgaacaaactaaagaacttctctaggcctccatgtgccctattttataaaatttttacaagaaccctatgcaactaaactttaaagagtcttaatactccctattagagaaatacggaataggctgggcgcagtggctcacgcctgtaatcccaacactttgggaggctgaggagggtggatcacctgaggtcaggagtttgagaccagcctggccaacatggtgacacccgtccctactaaaaatacaaaattagccgggtgtgatggtgcatgcccgtaatcccagctactcgagaggctgaggcaggggaatagcttgaacctgggaggtgaagattgcagtgagccaagatcgtgcctctgcacttcagcctgggtgacagagtgagaccccatctcaagaaaaaaaaaaaaaagaaaaagaaaagaaatacagaatatatgacctcttttgaattagattattaaatttttgtgccacctatcacccccaaaatgctatgtataacatggtacagttaaacctaattaagcataaacatattccatgtgattttttagcgttttattatatttaaagttgaaaatcatgtgtacattctgcacacacatattagtatataaccagccaggcactggctctggctctaaggacttaagattaattagacaaatgagttgtattattcttgtatgtttattggtttataacaatgcaactgtctcagggacttcaaaatggattgagatagtctggatcactccaatttacatcttcattatgttatcatagatcacgttatgaatgtaattagcataagggtagaaaatttttttaaaatgctgaagttcttagtgtaatggatgaaataagaaagaagggaaacatggctaggagaatgaagtatgcacacttttgaaataatcttaggaaaagcttacactttcttgatatttaaaaatatttttagttctcgcatatcattgattatgtgaatatataaacacatacagaacatttttgcctcccaattatttagaatgccattgtttttgtcatttccttcgtccttagagttgtattaaactgtatagcaatttatttcaaggtacaaatggtggtaattaagtggatgatagatgagcagaaacttgggtataatagaatacattaaatttctagcatttacttcagtgtcatttgtcatttctaacaaagaatgattcaccacgggattgtgagaaattttctatactgggtagatattggtatctttagtatagctcagtttctggtaaaagcaggaattaatatgaggtaatcactcaagaaatttctaatctaattactatatgatttaaggggtaaaagtctctaaatcttggaaataacctctggattatatgcccaagagcaagttggcagtacagtagatattccagaatgaaccactcttctatagtttacaaaaattacagtcactcataagacgccataacaaccaggactctaaagcagagtgtaaaatagttatgaatgtagtcaagtatacatgctattttctaaaattgcttctgtacatcatgtaatttcctcaggtgaagtcatctaacatattatgtgtggtacctaggaagagaacttttcatgaacaccatctgcattctgccattttgtggtcttaataagagccttcgcaatgcagggggtgtggagaattgacagattttgtgcatattcatgctttttcaccatgtttgctatattcatcagaatataagctttcaggtttaaaagatgagctgaagttcattttgctgtgcaaatcagcacattaaggaagccaagcagaaaagccttcgaggtaaacagaaaacctgaaaggggctttgctctcaactataatgggaaataagatttaaatgttaatttgacctaagagtcagaatcaagaagtacagaaaaaaaagtcctgaaaatgtgtatacagttgcaccttagagtgtgaaaaatgacagaacttacttaaaagttaaaaaatattctattaaaacttaccattcatgtaggttaaaccactgtaacggaaagactcaaagggtatttatttatttatttatttatttactaatagtataggtaggtgttcctggttggtagctagctctcttccacatcgggacgcaggctacgtttttaatagtacttttttgtcttctagggccttgccattgttcatatcataaagctggtctatcatgcccagtgcttggacagaagaagaagagagcaatggagacagcccacctgctgggttaaaggcttgagcattacagcagcacattcagctctcattttattaaaaagaatttggtcaaatgaccacactgactgcaagagaggctagtaaagtagttttgctgtgcatccaggaagaggagcagaaatgattttgtgctacagtcatctacatgtaatacacatcaacaaacaaaaacatgtatgtttccaacatatatgtttggagacagagtctcgctctgtcccccaggctggagtgcactggcacaatctcagctcactgcaaccttcccctcccgagttcaagtgattctcatgcctcagcctcccaagtggctgggactgcaggcacgcgccaccacacctggctaatttttgtatttttagtaaagatagggtttcgccatgttggccaggctgatcttgaactcctgacctcaaaaaacaaaacaaagcaaaacaaaacaaaacaaaacctcagaactaattggattaggatcccaccataataggctcattttaaattaatcacattaatcacttctttaaacacaattaccgtatttccaaatagggttacaatctggagtactggctgttgggactcgaacatatgaattttggggtgacacaagtcaactgagtacattctgtactctccctaaaataaaagaagtttaaaaacaattgctgtcagtcatttggctgtgtcatcatctaagctatctaatgataagagaaacagcagtaactgttagcataccgattgtataaacttgggggatatttatgaatacaacatcagtgtgaattaccagtttaaggactttacagagaaaaaagaggaaggaaatttatgtcttcaagtccggatatttagatgtgtgcttgagtgagtagcaatctttctgaacctcagatttcttttatgtaaaatgaaacaaaccatataaatctaagtagaaactaaattgcatcatttgtcaaaattaaaacaagataaaatgtgtgaaagcattctgtaatattttaggtgacacatattcatactggacaaattgtgaatgatttctgcctttaaaactcaaaaaaaaaggctaaattgtggatgttattatttactatttaaatagttgaataatttaaactaagcctttcaacaaataattgccttataatcaattatccatgccttctctttttatgtttaaaggaaaataaaaatatcgttatttgcctttttacttttatcatttgcagcttctttgaagaaaaataatctgtcaaatttttggtcctagtattacagcaattccttccaaacatttttgggagtatatctctatcagtaaaaaaatgatgttaaggccaggcatggtggttcatgcgagtcatcccaacactttgggaggctgagatgggtggatcacccaaggtgaggagtttgaggccagcctggccaacatggtgaaaatacctctcttacaaaaataaaaaaagaaagtgaaagaaagaaagaaatatcctggtatcgtggtgcacacctgtagtccagctacttggaaagctgaggcaggagaatcagttgagcccgggaggcagaggttgcagtgagcccagattgcgccactgcactccagcctgggagacagagcaagactccatctcgaaaaaaaaaaaaaaagatgttaagtttgcattatatgtgtttatatgtgcctatgtgtgtgcatagaaataaatagaaagaaagatatgtgtacatagcagtattatatatcttagtgtatacatatatatatgataagaaatagaatctttaaacagatgagatgaaaaaggaaattttgttaaatcagttaattttatttactagagatagagaaccttttttcctcactaatatattgctaatacatattgttttataaaatgaaaagattactattaatgtatgtttataataatagtgagaattatgttattcatttttatgccccctgagaatattggcttaatattttaagagacacattttcaaaagtctggttcccttttacttcagttttctgtagtttttagtggatataagtgtttaaaaagatactttacaaagttacaaaacttattacacacatatcaatggtttattgttcatggtagtggacacaaatacatatttcaataatacaataatatcaatatttttatccatttattatcaagccttattaagtcatcacttaataagtgatgcctaaaaagctctctcgctagtaaaaagaaaacagttctactttctttttttttttttttttttgaccaatacattcctttttattcaacagagtttaagttgggtcttacagggaataaacatgggtagattttttttaacccatcaactcatcgtttacattaggtatttctcctaatgctatccctccccctgccctccaccccacaacaggccccggtgtgtgatgttcctctccttgtgtccatgtgttctcattgtttaattcccacctatgagtgagaacatgcggtgtttggttttctgttcctgtgttagtttgctcaaaatgatggtttccagttgcatccatgtccctgcaaaggacatgaactcatccttttttatggctgcacagtattccatggtgtatatgggccacgttttcttaatccactttcttactagtcaccgctttcacgatagtgttatctgtgagctacaatttctatgggggactgttttttaagactactgttcattttaggaataagattttagttaaaactagaaaactccactttcataggcaaactgtagtccctagacttacattgaaaacaaatgaaaaatgcaagcaactctgtggaaccttatgattttgagaaaatcttgagtgttccccaggacatgttcaatatcctaatcaatatctccctactgcacaggggaccagatcagttcttatattttatattcattagcattattcattccttaagtttaaaataaattaactattttaaaaataagtaattacaaatgtcacagttttctaccacaatggatagtcttgcatatacctgagtatgtcatcctcatattaagaaaccagcaattttaactctctcgaaagaactcttagacatcttatcctagtataaatttgggtcacacattgtgataaagaagaggaaactgttattaactctcaagtattgcatggaatggaaaatccataaattcaagggtgtctgtttttatgcgcatcataaaagtacatgactacttaaactctgtatttataatgtttgctgaaaaatagctaaccttgtcagaaagacatttaacactttttgaaggattctagaattaaagaaaaactactaaacaggcaattttattttgaagttgagtgcttgcctgagaaaaggaaagaaatgggaggaaaatgtatgcatattgaaatgtctcaattgcatgaaaacttttgatctcttccttgccaaaaaaaaaatcaatatttctgattgcattatgtatgaagatctggaatataagcattcactaatttcactgtattttcattaatctacaatcaaatttctgaatgatacaagttgtccatattatatttgtttaaaatatttccagagtattttactctttatgtagaataaaaaataactggaaacatcttgctaaaagggctaaaaatgtatttttaaagaaaatcttctaaaatattctaaggtctatttaaatgtatggaacttatatatgcatatatacaagtcttttttttccttcaagaaaataattactttaaaaactttgtttagaaagttttttttggtcttaaggttacttaaagaaataaatagctttactttctaacccaatgcaacagtcctcaaaatttcccattgttaaatcatgaataaggtactaaaacaatttttgctggagcaaatcatgaagagtttagagtacaaaagcaaagggaattatcaaggcaacactcataattccttcattattacatagattaaaatatttataggctttgtactgaaatgttaaaaaataatcttttaaaattctaacattgttacaatattgtgggaaatgaagaaaacactattgagcattcaatacgtgttgggcattctgctgcaaattttttatatgcatctcatttaatttttccagcaagtatatgatgaaggtagtattagacccacttcatcagaaggaaggttatgttcagaaatttagtcattgtgtcaatatcagggagcttagaacttgcagataaaagattgaaaattgagaaatactttatcacaaagcatttcctcattgcaatgttaagcaagactcaaattatctggtcgttgggcaaaaattttaagctgatgctattttcaactaggccagggattctctactttacagctattgacatttcaggcctggcaattctttattgctggactctgtgctgtgcagtgcggaaggtttagcagcaactttggcatattttacagatgtcagtaacacacctgacccaacccaattctaacaaacaaaaatgtctccagacattgcaaaatgtgttttctgggggggcaaacttgcctctggttgagacccatcaagcagtagaataggatgagagtcagatcttcatcctgcccatattctacccttccttcttccctctgtgcatgtgcacattcatcaacacacacagatgcacacacacagaattagaactaacatcaaagagagtaagactataacatttacaacctagtaaaagaaagcaaaaaatagtatctgaatccactcacataaattataaatcaatagtcacaatacaatttttttgagaatctgaacagaaacttcatgagaagaagaatcatctcatcaagaaatcttccgctgccactctaaatttagttttcaaatctcagcatgtccactaattatttagggagcaaatattatattaaaaaatgtataaaggggtgatgacatgtaatgccccaaatggtatgttgataaatccagaataaacaaaaatgttactaatctacaaataattcatcagagataaatccaagaaaatcattttgcatcttaccttataggtaagtaaataaataaatgttctgcaatagtcacagtttctcaaaatacttaatattaatcagattgactgggtgattttgaaccccatttggtgaactgctacctgcaaggaaaaatcaaggttctggacacttagtcacttctcattgacactgtctactttcctaactcttcttaaggcgaaaaatctctagtctgaatcaatggcaaaataaagttctcaaggacccacaaagagaaggcaatgagatgtatactaggatataaaagttttaaagggaagagtaaatgagagtcaaaagttcattttctttctgcgggtttatttttctttctcctattattgccataaaatattcagggccagggaaggttttaatggtagcaatgcttccagcctctttagggaaagaggacagagataatcaagctcacataagggccagtctacatatcacctatgtatttattgctgattcactatgaattattttacactacatgatccaaaatgtcacttttgtgatcagataattctaatgctggctatcagttttgaaaactaaaaaaaaaaaacaacaacaaaaacaaacaaccaaaaaaacaaaacacaaaaaccacctttgtgtaaacttgattcatccttcaggccaagggaagaactcagcttccaaatggaggcagtggagaaggagacagtgttgttatctacatggaatttgttaaattttatttctctctctgtttttatgtcttttcttctttgaattttccttcctacatcatttatcttacatatactctccttcacctaactactgaagggatttttgttgcaaacaaatctgctcctttttatctcctgtcttttatttccctgcagaatttccattttccctccactgaaacctggatcaatggcttcccactgactctggatgatttgccatacttggtgaccttaacattttcttggaagttttagctcaaacaacagcctctcagttccttcatctaattcccgctagtgactttctcagccgttcctcatcagccaactgcagataaagtcttaactacttcacctcaaaaatcactatctcaacctcctgctctctgactatatccatgtatttatgaaacactcactgttctcgtaagaagctctgctccactaacctctctattgtcactcacttaatcagcttggtccttccttcattctaccatcacctaacttagatcctgtggtttataattcctaaaacattactgaaaatgtgcagaaaactagtgcttctcaaatgatctgtgatcaaagacattgttttgttgttgtcagtgatgatggagaggatggccttgtttataaatcacggtgggacagcacttttataaaatacaattaaaaataaattattaaataatacagtgtaaaagtccccaaaggcacacaaaacactgctgtcaatttgttattagaagcttcaaccgataaaatatgtttaacttgaaatcacatttcataacttttactctcattttctggaaagtgcgtttcttgctaaagactggtaacaaaccatgtgcaaactaatgccagtttgtgtgctattttgaacagtgtaggcttgacctctcttccccctatagcttttctttgcacatgtctgccaaactccggtccccagtgatctgcctttccctgtgcctctgatatggtttggatatctgtccccttcaaatctcatgttgaaatgtaatcctcagtgttggaggtggggcctggagggaggcatttagatcgtgggggcgtatccctcatgaatggctttagcaccattccctttgtgatgagtgagtctatgaaagatctggttgtttaaaagtatgtggcacctccgtccccaccttgctccttctctcatcatatgacatgttagtcctctgtcactttccaccatgattctaagcttcctgaggtctcaccagaagcagatgccagccctatgcttcttatactgtctgcagaaccgtgaactaactaaaccttttttttccatcatttatcctgcctcaggtactcctttacagcaatgcaaaaacagtctaatataacttccgaagaaattggaagttggccaggcgcagtggctcacgcctgtaatcccggcattttgggaggccaaggtgggtggatcacctgaggtcaggagttcaagaccagcctgaccaatatggtgaaaccccgtctctactaaaatataaaaattagctgggcatggtggtgggcacctgtaatctcaactacttgggaggctgagggaggagacttgcttgaacccaggaggcggaggttgccatgagcagagaacatgccattgcactccagcctgggcaacaagaacaaaactctgtcttaaataaataaataaatacatacatgcatacatacataaatacataaataaaaacaggaagctattcctcctgttgtcaaaaaccaactgcttcacccatgttttggatctatcttaatcttctctgaaatcttaaactactttctttctaacctttcaacttctcataattagctggctccttctccttggttttctggacatacacatatatttctcatcttttaaagtaagttccctttaatcactcatttcctacctgccatcctatctctctcctccgcttcatggcggaacttcttgaaatttgtcctcttcctctgtgtgtatgtcttaacttagcccttcttattcaacttactccatttgattctgttcccaccactcaagcacaattattccttcttagatcaccaaatacttctattttaataaattctatgaacatttcagtaatatatatagtattattgcttttttcttctttcttagaactgtttttctcattctgggcttctctgataccctactgacacagcacttttaaaacattttttttctctgcagaatcattcccctttatccggatcattaaatattagattttctttggccattttacagacatttcttactccttctctaagctctctcccaagcccatccatgcatatagctaaattacctacaaatgattatgaagttcaaatttgcttcatatttaatcaattctaagacaaactttccctcatagtttaacatatgatctgaaaaaataatgtatctaacttagaatagataaaatttcagagtttaattgaaatatttcttctttctcagtgatacattaaaaatatggatattaaaatccatgatttttttagattcactaaaatccagttatatccaactttgatccattggaaattcgagcttatgtaactactcatagtttccacttaaatgttttaaatagtcttcttcaatgaaaactctgttgttgacacttattatgttctatgtgaatagtgacctctggggttacattgcctagtgattctgtaaatatacccaaagtcaattgtacaaaatcgaacacacgatctccaccttcccatccacttcccaaccacctcccaaactgtggtgctcatccaatgttcactattttcgtgaattttaacttcacacattcattaacacaaaccagaaacctaagtggcaaacttcatatttccttctcctgaaatgaggcatcatgttcttttgattttatcacctaaatatttccctaatttctccagttttccccatttctaccaatactctctccagctcaagtgaacatcatctcacctaaaactacataatagctttctaacttatatgaccatatcctttctggctccctttctcgtcttttctccattctgtggtcagagtgatgaagcaatgctgcccatgtttacaacccattgatatcttcctatggctagtatcctcctgggatgctttgtatttttgtgcttttaattgataccttatgttgtgccgtctttccttttttgagtaatgtcttatctttaattctataatcattatggtgaatgtctgtattaagaatttatgtctttgttggtaaatagcaagagtggctctgctatttctacactcccaggtttctttcagttagtctgatattttcattaaattaagtcatgtattaaatcccaagcagtcatatattagaaaggaaaatgtctcaaatgtgtcaatctgattctttttattagattaatgttacagctgttttgacagaatgtaagaaaataccattatttacagaggtatgacatttaaaataagtttgttgtatttatgcactgattatttgtttttcagtggccaaaccttcatagacgataagttgaactttcaaaatatttaatatattgttatcatacattcttaagtacatttaataattgacaaaatagtaaaaaggttgcctgtttacctggctccctatgcaagaaagcaaagaaacaagcttgtaaccacataatgagtgctatatgctattgcgtgtttcagtctcaccttatggcaaatgaataattccataaaactgtttgacattattctccccaaaatctctataaaagtagtaccgcttaatggtatgcaaatcagaacaatctaaggaatttaagatatgcagggggttttcataataataaactgtatcacttcttaagcctttccttttgcctatgactatatgcctttttctttatgattatgctattttacttgagatgaaataatctatatcatgaaattccctaggtctcttgtaagtaggataatgggaaatgcttccatacttttaaaatgtacgatgtttatcaagaatattgattcaaatttatttaatttttcaatgtttacatttaaaacatcaaaatcactcattttctacttattgcagtaagttataaatattatatatttcagtacatgttattataatttatattttgagtttgtaaaaacaaaatatctgattaattttaaatagtcatcaagatcctgtagaaactctgtgtctgtaggtttgttgcttattatgtgtagctatagtatgccattgactaacctacttatcccatttcacaagtctttttgaataaaatatatctgaaaataaaccagtgtttctatttcactttagcatcatcatataaccacctctattctataatctataaaacagaaacagattaataatcaggacctgttctatatatctattcataagccctaaatcttcatacaagagaacttctaattacttttgtgtcagaaagtcgaagttgaagcacaggaaaaaatgtaggaagctttctactatgttaatggaagattgaggagaaggagttgaaagcctcactttggcttcagaacaggctatttttctctgatatagcagccttgattttgatgcaatgaacttgatgctgtaattcagtccatatgtgatgctgggtctctttcccttattaattagaatctgtagaaaacaagtattgatactatacagtccgacactacatatcatattttataatatgattatataatctgtgcaagtatgattagtagaaatatgttaaaaattttttctattagatgtataaatatattatttttataaacctcaataatgtccttcacttactgtgctagtctgttttcacactgctataaagaactacctgagactgggtaatttaaaaagaagagaggtttagttgactcacagctccccacggctggggaggtctcagaaaacttacaatcatggcagaaagcgaaggtgaagcaaggcacatcttacatggcttcaggagagagaaagagagaaagaggaggcggccacacacttttaaactatcagatctcatgagaactcactcactatcacgagaacagcaagggggaaatctgctcccatgatccagtcacctcccacctctcttccaatttgacatgagatttggaagggcacacaaatccagaccatatcacttatataacaatgtatgtatgtaaaatttttaaatatcaataagaacctttgaacactattttatagcatatatgtaatatataacatgtttatatatgtacatatacatgtatatgtataaaatcttgaaagaaaaattctttcacccaggattacaaattagggaagtatgggtttgtatataatcctagaattatataattttatttattagatttataataatgattttctttggaaagttgaaaaataattaaattataaaatttaaaaataataaattaaaatcaaaatttatctgtaatgtgctttatttattaaaaattagaaattaattctaaaatattagaatagtttttattttcattttttatatttatttttagaaactatttttatttgaatgtttataaacaaaaagaccaagtatcttgaatattatgctgataatatggggacagtctattgtatgcagctcttggtttacatttctcttaaaaatataagcactaatctgatatagtccaaagaatgatcaaatgtctttttattacagcattagaaaatctctttatctgctcttagaagtgaattttcattactgagccatataatattgctgccacagaactcctactagctagagataaattggagagccctgaaaaaaatgacatgagtaaaatgaaacggatgatgttggtgagatcactcctacaaatcaagacagagtgtgttctctcctctttttggctcaccccagtgagggctgtcatctgacttgagttggttcactaggatcatgagtagaggtggttcctttctccgacatcagagactgaggccaaacatgagaaccacagcaggtatttcattaccagatagtcactctcaagtgggttgttatgcaattgatccaatgctaaccctctttaaaagggcacattttccctactttattgttagaaaaaagcacatcatgtattgacatgttgtactgatttttctttttttttttgtactgattcttcataaggcatttcatccatcccatagttaactatagatcatgagcccatttgacataaagtagggtcatgtatttcctccttcttctcccacattgttttaacggtcctgtcagcatagactaaaaagcaatggtactaaaaaatccttctcaatactctaaatcttgaaaagcaaacttcaatgtaacttctgcactgtatcaattttactgcatttttgtcaatgaatttaacttcatttaaaaaagtgaattgcagtttataacatgttggaattctctattaactaggttataaagacaattttgcaaaatatttcatgcatttatgataactgcattattattgacaagggatcatgaacccagggcctccactgactggaaaacctttcagaactccctgatagtcagccctaaccaagactctggccctggctataacaatgtattctgcactataactataccatctccattttcttttctttttttttttttttttttgagacagtcttgctcagtcgctcaggctggagtgcagtggcgagatctcggctcactgcaagctccacctcctgggttcacgccattctcctgcctccacgccattctcctgcctcagcctcccgagtagctgggatcacaggcgcccgccaccacgcccggctaattttttttgtatttttagtagagacggaatttcaccatgttagccaggatggtctcgatatcctgacctcgtgatccacctgcctcggcctcccaaagtgctggggttacaggcgtgagccactgctcccgaccaccatctccattttctattacatatcttatggatttagaagaggtgtcccacatatattactttttatattaaaaagttctcccttgatttccaatctctgggtgtcttttaaaatgatattggcaaatgtttctgtgtagtcatcattttaaaaatagaatacactatgtatagtgaaatatatcagtctcttttatttatactgaaaaatatggcttgtcttcatgagtgagaaggaccgctataattacaagcttacctgcacacctgttcaccttgtatagtaaaagtaaatatttcaatttcatgggtcaattaggctccacacatatgttgacccacaggatatgacctgaaatgaggtaaaaaattaacacacctagaaccggaccacataatcattttaagatcctgagtgacaggtaggttaagtttgctctccatgaggattaaaggcttccagctcaaattttcacctgtctcaaagtggaaaaggccgtactgtgtttcataagcctcttcttcaattgaaaacacagtaaacatggagcatccctgaaaaacatagtttcaaatcaggctctaaattctcaatttgggtcatttgcttgtttgtttgtttgtttccttgtgaattgtttaagttccacgtagattctggatattagacctttgtcagatggatagattgcaaatacgttctcccattctgtgggttgtcggtttactttaatgatagtttctttagccgtgcagaagctgttaagtttgatccgatcccatttgccaatttttgcttttgttgcgattgcttttggtgttttcatcatgaatctttgcctgtgcctatgtcctgaatggtattgcttagattttctttgagggttctaaaagttttgggttttacatttccgtcttaacaataatatgaaaaaaaaataaaagctccacatcactgatcattagggaaatgcaaatcaaaaccacaatgagataccatctcatatcagtgagaatggctattattaaacagtcaaaaaacatcagatactggtgagtttgtagagaaaaagaaaaccttttacactgtgggtgagagtgtaaattagttcaaccattgtggatgacaatgtggcaattcctcaaagacctagaggcagaagtaccatttgacccagcaatcccattactgtgtatatatccgaaggaatataaatcagtctattataaaaatacatgcacatgtatgttcattgcagcagtattcacaatagcaaagacttggaatcaacctaaatgcccatcaatgatagattggataagaaaaacggggtacatatacaccatggaaaactatgcagccataaaagggaatgagatcatgtcctttgcaggaacacagatggagttggaagacattatcctcagcaaactaacacaggaacagaaaacaaaacaccgcatgttctcatttataagtaggagctgaattatgagaacacatgtacacgtggggaagaacaacacacactggggcctgtcaggggggttgggggcagggagagcatcaagaagaataggtaattgatgctgggcttaatacctaggtgatgggatgatgtgtacagcaaaccgccatgacatacatttacctatgtaacaaacatgcacatcctgcacatgtacccctgaacttaaaagttgaaggaaaaaaattctcagttggcattattgcatcagatagcctttccaaaatagtgtgaagctcagagaaacactaggtagaaacggctcataaaaccagtggtaggagcataggggaggataaggccaaagggtttctatctgtgacaagaaccctagacagaagcaagatagcatttattgatatgccagaaactttataaatattctctccattagtaattagaagcagatattttgattaggtatttttacccatatttctcagagtcatttctccagatacatatttttgtaagcatttactacataactccgtctgagctcgcaacttgtgatgcaaggaagaaaacggtaacctgccacaatatgtttatagagaaagaggagaggcatctaagaagacacaataattggtataaatctcagaaaagaagtctcctaaactagtatgttcctcagaaaatgtgtgtttgaaactgcaaccctatcaattaagtacattgggattaaacatttattttattttttttttcgagacagagtgtagggtgtggtgcagtgcatgtagggtggagtgcagtggcacgatctccgctcactgcaacctctgcctcctggattcaaacaattctcctgcctcagcctccggagtggctgggattacaggcacatgccaccacgcccggcttatttttgtatttttagtagggacagggtttcaccatattggccaggctggtctcgaactcctgaccttgtgatctgccctccttggcctcccaaagtgctgggattacaggcataagccaccgcacccagccaaaattttttataacaattcaacattgcaatgatatccaaaggtccagtcattttttctgatgattcatataatttttatggatcacattttttctatcttacagaagtttttggtccataatggatcagggtttaaacaaagaaaacaacgggtctttcatcacactatgttgagaagtaacaacctaatctaactgtgggtagaatatagctatccaggaggagagaacagcttggatggctcttgaatcataagaacttacatccccttcaatgaaacaggtgaacaaagggtgaacaaagggagataagaacagctcaagcatagaaatcaccatgtaaaaatgaaatgagaacccaaagtttaatccttttccaaattatgacaatttgtaaacatttgagtcgagattcaaaatcaactttaaccatacattttctacttgtttcactcacatcgaagtcccataataaaattggtgactgatggataaagatgtttcctttccttcataagtaacctagagtcagccctgaccactttgattttccaagacatatttcactactcctgctgtttctgttggaagcaaaatacagatagaaacaaaagcatatgagcaaatacaaccccttacctctggtgggtggagtgaagggcgctttcttaattgctgaacttcccctagagcaacttggcagtaaaagtagcttttgacaccctgacgatctctgcgtgtttacatctagtctcaattatcgcattgctcacaatacttaccactatttgaaatatataaaaaggagagcaacatttcaataaacgtattttacaaatacactactaaagaccattttttgttctgaaaggttaattttacaattgttttatatctcatgagacatttttagagaaagttttgttagcctttgtttagtcaatgcaaatcatttctttggactcactccaccttttttcaaagaggttcccaagcactttttctatggagtgtcagaaatctgtaataagcaaagttcaactcaattgctgatttcacttgttcacactgtctattagcagagtcattagagtaaccgacatccagtggcgcataattagccctgactcctgcaagtcttgaagtcatcattaactaagtaaagagctattttgtatttgcaattttagtccctgaaccaagataaaaagatgattttattcattttgggaagacagatttcttgtagagagtgagaagtattaaattaactagggaactgacatcaggagcctagcgcaggagtggctactgagggcaggaagctgagattacaacccttcctgaggttctaataagaggtgcccagtaatcccagtgtgtatttattggagacttactcagaactccaagtagggatgtgaatgaactagaagtcatcatggactatcaacaaaatagatggactttgatgcaatatgacctcatgtgatgtggtgtaggtagaagggcctcctagcagagtgctggatgtggactttggggtcaggaattgtgagctgcattaaactctgaaagagtcagataatatgggtgggccttgtgtagagggttcccaaatttgagcatatcagaatgaattggtttgctggttaaaaatgcagcttccctggaccaaccctagagattcctttttttgtttgtttgtttcatctaaaaaaacaaaagggatacatgtgcagaatgtgcaggtttgttacacaggtacacgtgtgctatggtgatttgctgcacctgttgacccattctctaagttctctcccctcatcctccagccgctaacaggctctagtgtgtgttgttcccctctctgtgtccatgtgttctcaatgctaactcccacttgtgagtgagaacatgcgttgtttggttttgttcctgtgttagtttgctgatgatgatggcttccagcttcatccatgtctctccaaatgacatgatcacattcctttttatagctgcaaagtattccatggtgtatatgttccacattttgtttatccagtctatcactgatgggcatttgggttggttctatatctttgctattgtaaatagtgctgcagtaaacacacatgtgcatgtgtctttatagtagaatgatttatattccttggggtatacacacagtaatgaagttgctgggtcaaatggtatttctggttctagatctttgagaaatagccacactgtcttccacagtggttgaactaatttacatttccaacagtgtaaaagcgtacctatttctctacagcctcgccagcatctattgttagtttcctgactttttaataatcaccattctgactggcatgagatagtatctcattgtggttttcatttgcatttctctggtgatcgatgaggttgagcttttattcatattttttttgccacataaatgtcttcttttaagaagtctctgttcatatcctttgcccacttttgatgaggttattttttttcttgtaaataaatatgtttaagttccttgtaaattctggacattaggcctttgttggatggctagattgcaaaaatgttctcccattctgtaggttgtctgttcactctgatgatagtttcttttggtgtgcagaagctctttagttagatcctatttgtcaattttgtgttttgttgcaattgcttttgatgaactggtctgctgattaaaaatgcagcttccctggcccaattttagagatcctgaatcagtaattctgaagtgagtgcaggcaccatgacatgaacgagactccaaggtaattctagtggagacgtctaataagtagccatagggagggagggagggaaatatgagctaaaagaagtcatagaagcaatttacaacctgacaggaagatctagaacaactatataatctactgaaatatttcttgagggcacaaaagggaagacaaaatttaccatgaccaccttccctcattcaggctgaaaaaattcagaagacagaagaaattgctaaaaattattttaaaattttcaattcaatttactgtaacaatcaaattcagtgcatggcaagcagtcagaaaaaggggattttattttaaaatggaaaaaagtgggttcaagtccccgttctgtcccttggtgacagcatcactatttatatgcgacttaactgttgcacacatcagattccttagacataaaatacaaataatgtacttgtagaaaataattaatgtgggaattaaattgacagcctatgcacaaacctctaaagctacccatttcacagggaagaatcttccattttttaaaaagatcgatgagtgaatattatagaaaaaaactgggtagatgtttaagcattaattctgggtgtgtctgtgaggttatttctgaaagagattagcatttaaattgatagattgaagaagatctccttcaccaatgctggtgggcctcatccaatccttagaaggaaaatttgtttctgtttgagctgggacatttaccctctatccttggacacaagccttcctggttttcaggcctttaagccgagactgaagtatggtactggctttcttggttctctagattacagagagccaactgtgggacttctcagccttcataagcatgtgagccaatattttaataaatctcctcttagatataaatctgtatctaacctattggtcctatgacttgtacatccttcatgtaaagcattcacttgacaacttaatcatcaacagagcctaccagtctttagagccaatgctgtttgattatagagaaaaattaattcctatgtgtcttcacttttgaatatccttcccatcttcttcagtatttttgtgactctcgagaggatgaactgccagtagtaccactgaagttcccaactactagggctgtcttccatgttaattcttcagttggcctcatttataggcatcactgtctcatcttgatgtcactggaagccaaactctttgtgacatttcatttattttgtagcacatgttggaccatacattaacttcattttctgtgtagtttttattgagaagtagaaccatgcacagttggatggcactgtgccttccaaatgggaagaagatcaataatgcagactaaagggcatagaaaaggtgacttttctaatctgcaacatgcatttcatgccatggagagccccaagcttcccccaaaagtagaagaagtgctatgatttagaaatggatggtgcttctctatttataaattgtttcacacatgacttaatctttatgacaacagtgtaacctaggttgtacctcaaggctcactttgaagatgtggaaaactgagaatcaaaaagcatatataaattgcccaaagttacgtagctagtgaacttaacagcaggacataatgctaaattttcctcccattacaaaaggtctcatgactgcagggactgaaagtatgtaaataaataaagtcacatacatgatcagacaagttttctagcaacagtcacccactcttatgacttttgcatgatttgattcaaataatcattatgtcttgttctattcttatcaaaagcgttattttattatcagtctctaacatgtgattgatctgttaaatgattgcctttgcctccttatagtagttgagtcaaacagttctgacagctgtcataaattaatgatgccgtggaaccattgcgtaagtcagacatgtcttagtgctagttgttttaatttacttgggtcaaaataccctgaatgtttggcatacacaaaattttgggtcgtgacaatcaggagttgttgtgtctaattaaatttgacttagtacctaatggtatttgttctgagtaaattttgaccattctccagttaaagagttctacagataaaattatcccatatttaaattatctttttaaaggactaaatatatttacttttctgttttatgttatggagctatacatcttttactacagtaggtgataatcacactaatgattgtgtgtctgtatttgtaatgctggggagatctttagttgttagtcctttcatagcaagctacctatataaatggtcttgtcaaacaacttactattttctaaaaatcctgttaacttcaccactgaatatttgataaataattttagatacatttgcagcctcaggagattgctagaattccaggtaagataaactggagcatgagaccgagcttacagatcaagctgaaaccccaaacacataggaaaatgttatgcaaatttatttgtaggcaagaaaacacatccttttgctatcttcaacctgctcctatggccatagcgaaggatgtgtttatttgccctcttcttgacacttcatttatcagaaaatgagttgtcaaagctagaggcattaattggacacattataccagagggccacaacccttgggctgtggactggaactacttgtctgtggactggtaggaacccggttccacagcgggaggtggtcagcagctgagcgagcattaccacctgagcaccaactcctgtcccatctgtggaggtattcgactctcataggagcacgaaccctactgtggactgtgcatgcgagggatctagtttgtgcactccttgtgagaatctaatgcccgataatctgagatgaacagtttcattctgaaaccatccttctcccacccctcctgtccatgggaaaattgtattccatgaaacaggactctggtgccaaaacgattggggactgctgcaatttactataagatagtaaccctacagtatgccttaagattaaaatgcctttaaagagctcaaagagtctgctttttcaaccttctgctttctgggtccatgtggaatttaggcacaggtaaggcctatctcttcagagtaggtttctctctctctctgtctctctgtctctctctctctctctctctcacacacacacactgtctcacactctctatctctctctttctctctctctctccctctctttctctctcttctctctctctctctctctctcatcctctttttctgcacatgaaaatgtataatttttagatttggaagagagaaggaaacattgcttgggtctccggcccaagactttgcctaatcaatgtttggttgaattattaagttgaaaatttaattctaattaaaacacactttgcttctcgtttgcctattaagtttttagtttggagttacttcatatcacagctatggacgctggcttcaaaaattaatgctattaaaataacctaataccaaatctctaattgttaacatagtttgtatacatagctctaaatcttgtcactgaaccagtgtttaattgtgacatctcaaaataatggaaacggaatatgagtttggatttgtaagtgtattagattcctaggactgctgtaacaatttatgacaaactttgtggcttacaacaacagaaatttataattttataactctggaggcaaaaagtccaaaattaaagtgttgtcagaacttcattctttctaaaggccctgagagaccatctatttgagtctctctcctagcttctggtggctgctggcaatctttggcgttccgtggcttgtgaatgtatccctgcaatctctgcctctgtcttataagagacaagggagagagaattgagattcagacacagaggatagacccaggtaaaacacaaagggacaaggatatgtgaataccgctcgttttgagattcccaatttaattacattggcaaagatgctatttccagataaggtcacattcacagattctagtgggttaagatacacacacacacacacacacacacacacacacacacacagtgggttaagatatatatatatcatatatgtatatatatatatcatatatgtgtgtgtatatatatatatgtatatatatatcacccacacagtgggttaagatatatatatatatcttatatataaatatccatatatattcttatctatattcctatttatatggatatatgtttatatatataaatatccatatacactcttatgtatattcttatatatggatatttatatatgagatatataatatatttatatatgagacatatatatgtatatatatcttaaccaactacacacactcccacacacacacacacccacacacacatttgagggccattatttaatgcactcttgaactatagtagagaatagtaaaagccagttcaccaccactgtcctgagcagtctttggatgttagtatttccatatacatttaactgagtagactccgaggtgtgcattacctaaattctcccctccttaatgactattttcaagaaaagtatttatagactgttggagctatgtctaacttgagtttaaaactgaaaattaaaacctgaaactaatgcttgtgggcaggtagtttaattggtaaattatccctgggagcaagcaagaagaacagatggaagtaaacgagaaagaagaaatccggtaaaaggatgtgttattgagtttgcagttggtgtttgatcttgcacagattttctcaggggccttaagaccggtgccttggaactgccatctgggcatagacagaagggagcatttatacgccaacaaccatctcccattggttagcaatggctcagttgaaattaatttctctgtaatttcagtttgcataagtctgagtataaatatgtccccattggtatctgaaaccaaaaccaaagagaattcctcagacaggaagcaagaagtaaaaggttgctgtgaagttgcccaaagcttatggaaggctatatgacagcatttgctgcagctaaaggagggggtgaaggtgcttcaagtgacacacaaaaaagcattgtatagatttacttttttctgtctagttgtttgcatgactcaactctcacttgtacttaaaccagtccattacagtatctccttcatgagggcagtaagcttcaatctaggaaaattaacacaaaaaggttaatgggaaaagcaagctaaggtccctactcttgcagtttgtctgaatcaaaatagttgatactcattgccttcttccttcacctcccattctagattactagccccttgctagcaattagttagtctggcttacttgcctgttggaggtaacccagatcatcaaaggggtatcgattaggctgtggttgttcttattatttgttcctacgatagttttgattaacctgtcactgctcccaattaggagcatgagaacatattgctcccaagatgtagcaataactctagctccttttaataactagtcttgattacatttgcagatacggtaattcacttgtttagctcttttgcctgctggttcactggtataaaaaggcccaaatcaccaataagtagttgtagtttcaagttcagttaaacccttatagggtctcttagagaaattgtaatttggaaaagcttaaagttgtgaagatacatttcacacatggattgctggaaatgataatgtaatggaacaattttacattcataccttgtatattatcttgtattggccattggttttcttcatgccccacattgtaaaagacagtggcccaatcctatagtgtgttgtcactgagaaggcactttagttagagttgtttgtaaaaggcaactcctccaatctgagagagcaggtacttctgagtggtgacgtatgtggtgagacctttgttgtaaaatggcccatgattcaaggcaattctttgcaggatatgttgccaactgataaagcacccaaaaatcttcaggtggtattgctgatgtaggaactgaaggaagaaaaggaaactcacatccgtagtatggaaaatcctaatatcactggaaccactctccctactaggtcgaagggatctaatcaatcagtcttaagcagaggctggtctcctccaagagtgtcactatatgggtggttcaatgtcattctttgctgctggcaggctggagattaagcaatagctgtagctaaattagctatagtgagacagattctatgttactggatcaagttttagtcctgtttgatattaccatagccacttcattcacaggttcattttcatattgggtcattctactcagtttatttggtagatgagctccagtggaaatttacatgctatataaagctctgcgtgctttatgctcatccccagaagttcactcacatgcttcctcccaggactgcctgatctctaattttccctaatctttcttcttccagatccttgaccaaatagttatgacatttgacatttcaaaagatttataagtatcacaactgctatctacttttccctgtgatatggtttgcctatgtcccacccaaatctcatcttgaactatagttcccacaatccccacatgtcatatgagggaaccggtgggaggtaatagaaacatgggggcagttacctccatgctgttcttatgaaagtgaatgagttctcacaacatctgttggttttataaagggcttcctctgcttcattctgtacttctccttgctactgccatgtgaagaaggacgtgtctacttcccctttcatcatgattgtaagtttcctgatgcctccctagccatgctgaattgtgaatcaattaatcctctttcctttataaattaccaagtctggaatatgtctttattagcagcaggagaacagactaatacaccctgtgtacaaagtgggtaacccagttttctatctgcacactggaggattttctttcaccactgtcttttagggttactactgagtgtggctataaaagtagccctatatgtgtggcagcactacatttaggactagaccaaacacagttactgctataaaccaagcccagttatttcttcctctctcaattagacatagggatctccaggaagccatagatgtgagctaatagacaggcactggtacaaacgtgtagctaccagtgtagtctcagccactgtttatataattacattgtaccttttggattttctcaaatgcagttatgaatttataattcagttatgaattcaaaatagatggctattgcaccctacctcccataaaagtttgactcagtggaaatctccgatctcacacttccaggctttcagtcttcactaaggcctagttctacaatgaaagccattttcaaacggtaaatagtttacactgtagaagtgtaactgtgcttcacaaatctaaagatctctgccttcgctctcctattgggacttgttataaggcgatccaatacaacatctttatccgttggatctgttgtgtcatgcgacctaatcagcacagcaacttgtaccatagtctggactcaaaactggtaaccatctaagtcatcataaaggaataagaataacattacaaaatgcatgtgtaccttctccaaaatccaagtgatatatctctttattattcttagagagtaaagagaaacaacttattcattctttagaatagaatagaccttggcttgccctgcaatattgtaattctttaaacctcactctgaaacttgacagattttatctccagtgttctgacatgtatgtctgttattataggcatctagaatacatatcaattcctatgcactttgtccaggaagtcaaatgtcatcaatagagtcaatcacaataaagttctacaagaatctcaagttccctttggataatattttgacaaacaatctgagctttaacatacccttgaagcttctcatactctaagaagtatttttcttatagttccctaacctcctgttacttagtcttactcagtaaacatatttctcttcaaactaaaacgtaagatattttaaagggaatttattttgaatggcttaatactatgattctctaggtatgcttctttgttatatgctttttctgattttttaaaacttatttagttaccatctcccctttacatgtcttaagtcatttacatttcaaagcaacaaaatgttaaacataaaagtctattagatgaggaactgggggaggtgaaaataaagaaagtaaccaagaaacttacatatatgtggcactcctgccatcttgtgggttttctgtgttttccactgacttaatttattatttttgtttcagggagttttttgaaagagcatagaggtacatattgagaactaagctgtcaattacccaaacctatcatactcaccaaaagttaaaaaaaattaattagggagacaagttaagtacaaaatgcagcttaatctcaaatagttttgaaaaatatcaatatttgtgcttatgtctatatctacctatacctctatctatagctatacctatacatacactgacatttattcctatggaatatgagacagatagtgagtgagaaagcctaatcataaacacatgtggtcaaattataatatatgaatctacgtaatattcttgcaacttttccttaatgttgaaattatctccaaataaacagttacacacacacacacagagagagagagagaggaagagagaacacattatctctctctcatcttttgcaactctgtcccagaaatttctccctctccattttgcatcattagtctttctctttccaccgaatcagtttgaaaagcctctcagtaccccatgtctcccaccagctatcgcaaacgtttttaccttttggaagcaaaattcctttaaagaagagcctattcttattgtcttcatttactccctcctttgccaaattctgtcttaaacctatgacacatatgtgtaatcatggataactaaaactgaactcttgaacttcccttccaaatgtactctatcagcagtcatcccatcgaattaatgggaatgtctttattctcttctcacttgggttacttcaatagctgtctaactggtcccctaatctctattattgcttttctataatttattctctatacagtatccagttatcattttaaatataaaatcaaaccaagtcactacttttgtttgatatcttcaatggcttcactttggtagcctgaagtctttatgaaagctccccttatgatctgatcatctttctggaactcttctctcaggcacatactccctgcttacttagttgataacttaaatccctgttccactagattcctctgctctagcctcctcactgtttttgaaatatatcaaacatattcctgccttagtgcctttgaacttcctttacacttcctgaaattatttttctaatatttgcatgaatgcactttattaaataccatttttgtagtgatcaagcttacttttttttttttttttagatggcgtcttgctctgtcacccaggctggagtgcagtggcgtgatctcggctcctgggttcaagccattctcctgcctcagcctcccaggtaaccgggactacaggcatgcgtcaccatgcccggctaatttttttgtatttttagtagagattgggtttcaccatggctggtctcgaactcctgacctcaagtgatctgcctgcctcagcctccgaaagtgctgggattacagacatgaaccaccacacccggccaagcttacatttataaccactacatcatacaccctggaagcccctatcttgcttaccccattttgtttttcttcatagtactccacaacaggcttatgtatttacttacatagaaatacttgcatattagatatttgtatatatctatttacacctcttgggtgtaagctccctgtgagcaacaactttgtcttttttattagcctaggaaactgtctggttcattgtaagtgatcaataaatacacattaaaatgaattactggatcctttttgaaaacagttgtctaagttgccttttctgatgaatgaagccaaaataagtaactgtaggtttatcaggaagttatttaaaaggagacccatatgctaccaaaaataaatgtatttggtcaaagataattattttcttataaaaattaagcaatacaacctatgtcattgaaataaaaattaagcaatatttaaaattaaattttactaaatatcatgactctaagtgtcttattttttctttatatctcccattgttcttaatacacttatttgtacaatgctcattaattccttcataaaatatttatttagagttgaccaatatcttaatgtttctctaagcttgactaaaattttttgcttgtttacttatttttattgatacatcataattttacatatttattaggtacatgtaatactttgatacatgcatacaatgtatcaaatccaatgggtaagtggaaaatccattgtctcaaatatttattatttctttttgatagatacatttcaaatctcttctagctatttttaaatataaaataaattctttttaactatagtcaccttgctgtggtatcaaacactagagcttattccttccatctaattgtatttttgtacttattgaccaacctctcatgatccccctcatccctttctcagtctctgctagctatcattctactcactacttccatgagatcatttttttaactccacatatgaatgagaacatgcaatatttgtctttctgtgcctggcttatttcactaaaaataacgttctccagtttcatacatgttgctggaaatgatagaatttaattatttttagggctgaataacattccattgtgtatatgcaccatatttcctttatccattcatccattgagggatacttgggttaatttcataccttggctattgtgaacagtgctgcaataaacatgagagtgcagctatctcttcaatatattgattttcttcttttgggtatatacccagtagtaagatggctcttttagatacaaaaaaaaaaagcagtactaataggggagtttatagcaataaaaacttacataaaaaatgtagacagatctcaaagaaacaacctaatgatgcatctcaaaaaattagaaaagcaagaggaaatcaaactaaaattagtagaaagaaatgttataaatatcagagcagaaataaatgaaattgaaactacaaaaacaatacaaaagaaaaaatgaaaagttatttataaaagataaacaaaacttacaaatctttagctagactaagaataaaagagagtagtcccaaataaataaaatcagagatgaaaaacaagacattacaactgataccacagaaatacataggatcattagagactggtatgaacaaatacatgtcaataaattgaaaaatctagaaatcaataaattactggatacataaaacctatcaaatctcagccatgaagaaatagaaaaccttgaacatatcaataacgagtaataagattgaagcagtactgaaaaattctcctatcaaagaaaggtccaggacctgatttcttcattgctgagttctacaaaacacttaaggaagaaatgatatcagctattcttaaactatttccaaaatctgaaaagaacagaatactttcaaattcattctatgaggccagcatacccaatccagacaaaggcatagctaaaaaagaaaaccacaggccaatatatttgatgaacatagatgcaaaagtgctcgataaaatgttagcaaactgttcaacaacatgtcaaaaagatcgttcttcgtgatcaaaagagattcatttcaggaatgcaaggatggttcaacttatgcaaatcaagaaatgcgatacatcacctcagcaaaatcagggacagaaaccatatgatcatttcaatagatgctgaaaaaatatttgataaaatttaacatctttcatgataaaaactttcaaaacataccttaaaacaatgaaggccaattatgaccagactttagacaagtttttcctgcctctaggtccctgaactcccttttttgagcagtttaccttagaaaacctctaattgtaaactctttctctgttcctttgagatgtaaatcctttaaaaagcctcttgcctgttttataacccaggactgtcattcccaagatcctgggagccatgtctgaaacttaatcatcaaggaagatagactcctctctcagtttctgcgtgaaggtagaagcctaactactgtgggtactttactccaagttgtaaaattgcatcctttcatgaagataggagaaagtttattttcatttggataaagacaattagcaaacactgaaagactaagacccccccatcttcacttttaggacttctgtggccctctatttcaacagagctgagtactaagacttggattgtgctctctctttctgctattgctcataatagtattagtataaaatcagtttctgtttgctggtctcatctgataaaatatttttctttaacagagtacacattgcagccaaaatataattaatataaataatctttgcatatgtgggagaaatatgccagaagaagaaataatttaaatcaatcttgactttttcccagaaaaaaattatacatgtatatgtatatatgtgtatatatgtgtgtgtgcatgcatgtgtgcacacatacattatatatattaacatatatacacacacacgtgtgtatgtgtgtgtatataaagaatttcttgatgttattcttttaaaggaaaatataccacaaagcataatataaatcctgatttactaaattttataattaaatatagttattattttttatattgagaaactccattaatttaattataacataacaaaccagtaaaataatacaagtatttgccaatagtattatctgcacttatttgatacttgggtttgctttaaagcatttgactaaaaataactattaaaattagaaataaggttaatttaaaaattgatatgaatatgccattttctactttaccacgtatctattttgcctatcatgtcataaaatttatatgtaaaaatttccactggcaccatacattatttaggtcattgataagaaaaaaagacaatgccaagcactatgttccatgcagactatttgccgcacactgaattatgtactccatccctcaaagagatgttggagtcctaatcccgagaacctcagattgtatttgaagataccatttttacagatgtaatcaaatttaaatgaaatcattagggtgtgtcgtaatacaatgtaattggaatgactggtataaaaaggggaaatttgggcactgagatagacacacccagaggcaggataatatgaaaagacacagagagaagatggccatgaacaagtcaaggatagaggactggaacgggtcttgtcctcacattctcaggagaaaccaatcctgatgaaaccttgattttgaacttcaagactccaaaactgtgagacaataagtttctgttaagtggcttgatttgtggtgctttgttaaggcagcccaagtaaaccaatacatgattcttgtcaaataaaacaagtttaaatatgattatatcatattaaaaattaagttggcaatcaaaaggactaattataaggaaaaaataatttattgggaaattactctccttttagttatttcctgttagttaaaggaaagttaataaaataatgaatttttattttttgaaattgatataaatggtggttattgatataaatggtgcttattcatagacatgaaaagcatccatccccacataccataatttacatattaaaatctagaaagcactagattatatgttgccatgttgaaggagcttctttcaattttcttcatttttaaacatatttccccatttattgaatttagcattatagaaaataattttcaaacttgttagcatcaaatccttggtgattattttgtgaaaatcataaagtacatggagtctgtatgaaatctcattgagagattaaaaaaatattgaaatgcttaggcgctgttttaccaccttttctttctcttcttacttttattactcatcttcaatataaaaccccttgggcttttaaaaactctttgatgtatatattcatccttgaacccaccccagcagccaataatctccacttctctttatattgcattcactttcattcgactatttgactttcatgctcaaattctctgaaggaaatgttttcttcatatttcattaggtgatattgcatgagtgaattcacatccaacattcctttttaattctgagtttataacatcgtaagtgcctagataatttcccttctattattatctcttaatctcttaaggtattaattattttcaaatgtcctctcttcccagctttcttaattagaattttactgtgatttattttttagcttgatattaaccttaaattaattttttgctatttttccaaaggagtaagaagggacataaatataacttctgaagtcattaatctttgtttattactgatataaacaaagaagatatccacaagaaaaatcttatctacttatttttatggtatcatgttcaggccagaggtgagagcttttgcttagataacttgtaacttttcaccttggaggtttgactccaagtttttctctattgctgacacctgcagatatgaagtataagcaggactataaaatggacacacacatacaaataaataaaaaagattacttggtattctgtctgtttcacaaatccagcttatgtgtgcctttcactttttagtcattttaaagctctgtaaattgtagaaaattgacaattcaactgatatttatctacagaaacactaaatagttgtgtacaattgattattgcctgtggatagaccagtttgtgcatccattaataaattaattttaccattctggaatgcatacaaatgtgaatattctaattttgctttgaactagttgtaacatcttactggtttctttgttaattcatgaataaaatacaatcactgatgtgttcttttaatatttatgtgtgtcatgattatgccctctttaagaaaattatcctttaaagaaaggcaaggcttcgccttatattaagacaagtcactttgacctatggaaacatgttagccatggatgattcataatttttcctgcaattcaatttcctgtaattcccttctcctagtggcctctacccctgtgccagaaggtagacagatttcaactgtccaaccgttatgaaaagcttcaatcacttttgacattagagagagagagggagaaagagaaagtgtgtgcatgtatgtgtgtgtgttggcatgtatctgtgtatgtgcttttacttgttactgaaaagtattaggagagatgaaagagtattttacaaaagctactccaattatacaatctcgtaaaactccagtcgattttactggtttcttctaaaacgtttattgaaatcctaccaaaggagtcatctttcctttctgacctctaccgcaaagcaatcagtcttgcccaagattttctccattttcccttctatctaatccttcaatctttattatgtaactttctcctctagtcaaaaacttaaagccagcccaatttccaaactctggaggcttcatgcatcccatggagagtttgtgcaagcatcttccaacaaagatgtagtgttcttcacagaggtaaaattcactagaatgtagtttccagcagttagctttttacagactcatccttagttttgtgtgtcatttactccatttttcttagtaacaagatttattgcagaagcaacaccaattcatgccactgagccaggtttgagataatgagtacttccccatgcaacaaaatggttatcaaactgatatttagcatttcttttttaataaggatatttacattgattctttttaatgacttaaaaaatacttctatttagtggatgaggaatgtcatcaaaatatcattctatcatctttcctttactctcctgcctccctctttccattaagtctctaagaggtgtcgattctggctctcacatatctcacagaaactactccgtctttccgtcttcatctgccacttcatgaaaccaggccatctagattttgctacctgtcctcctgtatatatctttccgtagctcttcaggtgctattgtcagtaattttctgggttctacttttctaaaatacatagttcagactttttcatgtgatatataaagcccctcatgtcatcttatttccattcctctgtttgtctacccaaattgacttgctttctatttcttcagtgtatcacagttaaagttaaaatggagatgggaggctgggcgtggcggctctcgcctgtaatcccagcactttgggaggccgagatgggtggatcatctgaggtcgggagttcgagaccagcctgaccaaaatggagaaaccccgtctctactgaaaatacaaaatttgccaggtgtggtggctgcatgcctctaatcccagctacttaggaaggctgaggcaggaagagcgaaactctgtcttaaaaaaaaaaaaaaaaagaagagatgggattagtactttcttctgaatagtaccttagaagaaggtactaatcccatctccattttaactttgacccagagaggttaagtacctgtccccagatcacacaggtagaaagagcacccagtcctaatacttctaactcatcacaactttcttcacttttcaaatcacttttacaaagacagacagtgaccagaggaaaaaaatggcaaataagcagcagaatgaacttgcagttcccactcagacaaaaagaacagcatgtggagtttcgcattgtgaacttttgctccaagaactactgcaggaacataacagaaaagctgagaaaattcacagtgcttttgaaaaaagtggcttgccactgcagtctccatgagacagccaaaaaactgagtgcccaaagtatgagaggaagaatgtccacccccaaacacacatcctcactagggaagctgaaggtccagatcacgggagaaagatttggccttacctggagacaagatgaagttagagttgagcaaaatacaggggtagaggaagcagcaggaagagccctgtgggcactcttggcccccagggaatgcatttctgactttgcctcccaggggtccttggtcggggctgccagttgaattagggaaagaccacagggagaaagaaactttcagctgaattttgtaacaattttgaccaaacacgaattttcctggacagaatctgggatgggggtgaatggagggtgcagatacaagcacagaaaccatggcaggtggggaggcgtgaagcctgaaatccctgcttgctttctcagcagggagtcttgtagccttgggcaagatctcagccttgctcactggctgtctggaaataaactcagtgctgttagggggacatggtggaggtgagactagccctttgggctgcctgagtgctgggtgaggcctgtcactgctgactttcccccacttccctggcaacctgtatgacacagcagaagcagccataattcccctgggaacatattccatcagcccgagaaccacaccctgatgctcctcagccgccacagcatgccctgcccaaggagagtctgaactcagacatgcctaaccctgcccctacctgatggtctttctctacctgccctgatagctgaagacaaaggacatactctcttggaagctctgtggcctcatccaccacctgagaaacctgaatacttatccaggtggccctaagacaagcttgcatcctccttatactagggcagctgatgctcccttgaaagggccacctcctggcttgaagccaaccaacacaaaaccagtgcactaaccaaaactacaaccaagaccctcacagagtccacttcactcccctgctacttccaccagagcaggtgctgctatccatggctgagagatctaaacatggatcacaccacaggactcttgcagacactcccaagtaccagagcctagtagctccaccaggtggctagacccagaagagcaaaaacaatcactacagttcagctctcaggaagccctccctagtggaagggtgacagcaccacgtcaaaggaagacatcttgggacaaaagaatctgaacaacagccattgagccccagatctactctctgacatagtctaccaaaaatagaaggaaccagaataacaattctggtaatatgacaaaacaaggttctttaacagccccaaaagatcacactagctcaccgtcaatgaatccaaaccaagaagaaatttctaagctgccaggaaaagaattcagaaggttgattattaagctactcaaggagacatcagagaaaggtgaataccaacttaaagaaatcaaaaaaaatgatacagaaaatgatatggatagaaaatctccagataaatagacagcacaaatttttaaaaaatcacaatttctagaaataaaggatccacttagagaactacaaaatacactggaagtctcagcaataaaattaaacaagtggaagaaagaacttagagctcgaagacaagcattttgaattaatccaatccaacaaagacaaagaaaaaggaataaaaaatgaacaaagcctccaagaaattcgggattatgttaaataaccaaacctaggaataatttctgtgcctgaggaagaagagaaaactagaagtttggaaaacatatttgaaagaataatggaggaaaatgtccctggcctcaatagagatctagacatccaaatacagcaagctcaaagaacacctgggaaattcatcacaaaagcatctttgcctaggcacatcaggtgatctaaagtcaagatgaaagagaatcttaagagctgtgaggcaaaagcaacaggtaatctataaaggaaaacctatcagaataacagcaaatttctcagcagaaaccctataagctagaaggaattggggttctatctttagtctccttaaacaaaacaattatcagccaagaattttgtatccagtgaaactaagcttcctaaataaaggaaagatacagtatttttcagacaaataaacgctgagagaattcaccactaccaagccaacactacaagaactgttaaaaggagctctaaatctttcaacaaatctttgaaatacatcaaaattgaacctccttaaagcctacatctcacaagacctataaaataataactcaaggggaaaaaaaagaatgtattcaggaaacaactagaagaattaatagaataataactcacttctcaatactaaccttgaatgtaaacagcctaaatgttccatttaaaagatacagactggcaggatgaataagaatttaccaagcaagtttctgctgtctttaagagactcacctaacacataaggactcacataaggtaaaggactgaaaaagatattccatgcaaatgcataccaaaagcaagaaggagtagctcttcttatgtcagacaaatagactttaaagcaacagcagtttaagaaagacaaagagggacactatataatgataaaaggactagactgacaggaaaatatcataatcttaaatatgtatgtacctaacactggagctcccaaatttataaaacaattactactagatagtgggggacttcactactccacggactgcactagacaggtcatgaagacagaaggtcaacaaagaaacaatgaacttaaactatatcctagaacaaatggacttaacagatattacagaatattctacccccatactgaagaatacacattctactcattagcacattgaacattctccaatatagaccatatgataggccacaaggtaagtttcaataaatttaagataattgaaattatatcaagtactctctcagaccatagtaaaataaaattggaagtcaactccagaaggaaccttaagaccatgcaaatacatgaaaatcaaataacctgcttctaaatgatcattgggtcaacaataaaatcaagatgaaaattaaaaaatttttttgaactgaacaataatagtgacacaacctgtcaaaatctctgggatacagcaaaggcagtgctaagagaaaattttatagcccaaaatgcctccataaaaaagtctgaaagagaagaggtagtcaatctaaggtcacacctcaagaacctacagaaacaagaacaaaccaaacccaagccaagcagaagaaaagaagtaacaaagatcagagaactaaatgaagttaaaacaaacaaacaaaaacatgcaaaagataaatgaaacataaagctgcttatttgaaaagataaataaaattgatagaacattagtgagattaaccaatataagaagagagaagatccagataagctcaattagaaatgaaatggtacatataatcaataacacagaaatacaaaagattattcaagcctactatgaacatctttattagcataaacaaaaaacctagagaagttgaataaattcctgaaaatgtacaccccttctagattaaaccaggaagaaatagaaactgaacagaccaataacaagcaggaagactgaaatggtaatataaaaaacttgtcaatcaaagttcaggaccggaaggattcaaagctgaattctattagacactcaaagaagaattggtaccaattctgttgacattattccaacagacagagaaagagggattcctacctaaatcattcgatgaagccagtatcaccctaataccaaaaccaggaaaggacataacaacaaaagtaaactacagaccaatatcccttatgaacttataatagatacaaaaattctcaacaaaatactagccaatcaaaaccaacagcatatcaaaaagataatccaccatgatcaagtgggtttcataccagggatgaggggctggttcaacttacataagtcaaaaaatgtgatacaacacataaacagaattaagaacaaagatcacacgatcatctcaatagacgcagaaaaaaattgacaaaatcaagcatccttttatgattacaatcctcaggaaaattggcatagagggtacataccttaaggtaataaaaaccatttatgacaaacccacagccaacactgtactgaatggggaaaggttcaaagcattccccctgagaactggaacaagacaaggatgccctctttcaccacatgaattcaccatagtactggaagtcctagccagagcaatcagacaaaaagaaagaaataaagggtatccaaattggtaaaaaagaagtcaaactgttgctgttgacatatgatataattgtatagctagaaaaccctaaagactcattcaaactcctagaactgataaatgaatttagtaaagtttcaggataaaaaaaaatgtacacaaatcagcagcaatgctgtacaccagcagctagcaagctgagaatcaaatcaagaactcaacccctttcacaattagctgcaaaacaaacaaacaaacaaacatcaccaccaccacaaacagcaacaaaaacttaggaatatacctaaccaaggatgtgaaagacttctaaaaggaaaactacaaaacactgctggaagaaatcatagatgacacaaaaaaatgtaaacacatcccatgctcatgtatgggtaaaataaatattgtcaaaatgaccatactaccaaaagcaatctataaattcaatgcaattcccatcaaaataccaccatcattcttcacaggactagaaagaaaaatcctgaaattcatacagaaccaatgaggagcctgcatggccaaagcaagactaggcaagaaaagaaaatctggaggcattacattatccaacttcaaactatagtatcagaccatagtcaccaaaacagcatggtaccagtataaaaacagtcatacagaccaatggaacagaatagagatcccagaaataaatccaagtacttgcagtaaactaatctttgacaaaagaaacaaaaacatgaagtggagaaaggacaccctattcaacaaatggtgctgggatatttagcaagcaacatatagaagaatgaaactggatccttgtctatcaccttacacaaatatcaactagagatgaaccaaatacttaaatctaagacctgaaaccataaaaattctagaagataacatttgaaaaaaccttgtagacattgacttaggcaaagacttcatgcccaagaccccaaaagtaaacacagcaaaacgaaagagaaacagatggaacttaattaaactaaaaagctctgcacagcaaaagaaataatcagcacagtaaacacacaactcacagtgtgagaaaatcttctgaaattatgcattgacaaaggattaatattgataatttacaaggaactcaaatcagcaagaaaacaaacaaacaaacaaacaatcccatcaaaaagtgggctaagaacatgaatagacaattctcaaaaaagatatacaaatggccaacaaatacatgaaaaaacactcaacatcactaattataagggaaatgcaaatcaaagccataatgtgatactaccttactcctgcaagaatgatcacaatcaaaaaatcaaaaaataataggtgttggcatggatgtgattaaaacggaacactgttacaccactggttggaaagtaaactagtacaaccactatggaaaacagtgttcagatttcttaacagactaaaagtagatctaccatttgatgcagcaatcccactactgggtatatatccagaggaaaagaagccattatgtgaaaaagttacctgcacacacatgtttacagcagcacaattcacaattgcaaaattttggaacaagcccaaaggcctatcaattaatgtgtgaataaagaaaatgtagtatatatttaccatggaatactactcagccataagaaaaaatgaaatagtggcagatacaacaacctggatagaattggagaagtaactcaggactggaaaaccaaaaatcatatgttctcactcataagtgggaactaagctatgaggatgcaaagtataagaaggatacaatacactttggggacacaggagaaagggtgggagttgggagatggataaaagtctacacattgtgtacagtgtacactgcttgggtgacgtgtgcaccaaaatatcagaaatctccactaaagaatttatccatgtaaccaaacaccacctgttccccagaaacctattgaaataaagaataaaatcaaaaatacataaggaaataaataaacgtcttcattgtacaaggccctcctcttgacaccagactttcaaacatgctatgttttctacgtggaagacgatgctttccttcttgattgacttaccttagactgccgtcagttatcagctgaaaggttactacatcaaggaaacaaccattcattcttttcagggactcttgctttatactctctccactagaacttttcactataacttgtctgtttaattttctgtcttacttacttcactgagtcttctgggaaagaaggaacctggtctaacttccttacgattgtttcccggcacctagcacagtatgtgacacacagtgacgttaataaagattttctgaatccatcaatgtacataatcataggtaataaacaaaatatcacaaagctgaaaatactgtgtataaataaacataagaaagatctgctgacttacaagtacctaaacatgtactttaatacaaataacctcttcttatattacctagacaatttacataattttaatacaatattggaactgagtgagaacgtagctactttttcatacaagggaggtaaattagtaaaattattttctaaatatatttatatgtagttacaacatttgtcacctttttcctagtaaatctgctttagagagtatattccaaaaaaaaatcaaaaaattattttgtttatgtagtcagttactgtagtgttatctataacaatgaagaattgaaacagctcaaaggtttaaaaataaaagaatattgaaaaaggtcacatattcgattctgtgtaataaactattatgcatgcataataatgcaaattagcaggattatgtactaccacagaaaaccgtgcacagaaaaatatgtggacaacatatagaataacttgattataactatataaaatttttacatgtatatttaaagcagtttaaaagtatgaacaaaaggaaagattaattcttaggtatggatgctcaaatcatttattgcttttgtctcccagatgtgccgatttattaacactaaaacctcgcttgatgtgaatttattctaaacttttaaaagtgattattacttatatttatgatattaatcaatgattctcatctccatgggaatacctgtagttaatgtctttaaagcatatttacttaagtgatctggagcaccaagttgacatttctcttctaccatattgtggcatttgatttcttttaaaattgattaggttgtacatacgtgatttaggccattttaaatgtattacgtctaatatgcccgttggtttttaaagcatttcttggtcaattcaccatggggtcatgttagatcaaccaggtcagggcataaagttcactatcaattagtcttcatatactggaaaattaatcttagtgtttccttcagccacatccaacttccacttttttttcttttttttctttttttcaaatctcattgctttaccagtttttctgtagaagctctaccaactgatgtatcactttgatcctccaggatgcacatagagaaatgaaacctgaaagagacagggagccaaattggccacctaatggcaccagaccacaatgcagaacagaaacttatgaaaagaaatgggaataagctattactgtgcagaaagaggatcagactgtaagaaatatctggcagggtatcagccaagccagttggaaaatccagagcaaaattaccattgagaagagtactgtattggaaaaaaaaaaaagtccaaatcacagtactccatcacagctgagatgctcgggctgcccagatgaagtataatcttggcttgaaaaccaagaggaatcccaaggcaacatgcatttagagggtgccagctaagtgtattctttgtacatgagagacaatttctttcttgaagctagataccaatggagcacccctggctgccatacagtcagccctagacttctgtcctgtgtgatttgacacattgtttagatttgttcttctccactggtcctttgcttaccatggtttttggctcattccatagttctctctctctggtctgtaaattaaatatgctcacactggtctcagaaattggtagctgctctcaatttactagtttcaactcagccaaataaatacatgtttattttgacaaatgaagaaagaaacattgggacaataacattaacactctggcataaaattaaattaaattagccactgatcaccttccacgagaagctgaaactaatataataaaaaaatcctggtatccctatatgatctgacatatttcaaactattcactacccatcactatatgttctttattccagagtccctatatacggaaaaattacactttctatctataacaccagggttggacatgtgtcttactttatttaacaaaaaagtgagagaaaatgttataacaaaattctgaagttatgttctgaaagctatcacacagttttattattagtcttaatttatacattttccttttccacaagactaaccaatagtaggagctcagataggagttgtctgtctgataaggacagaaaaataaaataatctgaaaccatccaacaaacaaaaaacaaaagcaaacaacaacaaaaaaaccctacacagttgcctcacaatagatagggtgtgaggtacaaataaacctttgttctttaagccacttaatttttttacagttttctgctactaaaaaataacctagcctaagacagtcgatgctttcgctggtcaaccttgggggttcagtgtatgtagtctaaatgcgtgtccttaggctaactgctttacatactatgtttcatctataacatagaataagagtaagccttggttttcatgataaacaaatgatacaaaacatgtaaatgactgagaagagtacctaaaatataacatatgctgaataagtgctgttagctgtcacaaacagaatgactattgcaacagctactgctagtattactattactactactactactatagccctatgagaaacagtgattcaatcccaatttctctcatgtctaccacttgctagatttatggtctgagacaatttctttaaacaatatgagcctcagtttccccacataaattgctctataccaatgtttatttttttacatccgtaaagtgctaacagcatatcagactcacagtccccagcccaacttacttctaaaaatagtttataggtcagcagttttctttttggtattaacctctaatggtccatatctagcaatttcggtatcttttttttttcatttccttttaaactggtaaagatgatccacatattgtttaaccttttgattcacctttatgaatattctaatattacaatttcataatattaatgcattcttcatctaagtagaactccaaatgaatcatattaggtatcaacgtttctgctgtaaaagtaactctactaaattttatgctaagttagcaaacacttagaaatacctaagatgaatataaattatggagcctcaagaaacacaggttagaagcttctttcttctggcatgttttcagggttgaagaataatattcttttccattttcttactggggaaatgcaacaaaaagacaacctttgtttggaattcgataattcttatttcctaaaattttccatgccactcttttctttctacacaaagcatcttttgccatgtgtgtgtgacattaattttcactgcaaccaattttcatgaattccacaaacagattacatatgcttttagttaccaacacaacacaaagcatatttttaaaatatacctcatttatcactgaaagaaataaagtagaaaggcttaagttagctttactgctaagtttttttagatgctaaattgccttccactcttctctttctggctgccttgacttcaatttctcttaaaattcagcccatgctctacacaatggcaaaattatcttcataaaaattgaatttgattatttcacttcccagagtacagccttcatagactctccaaacattagtagagtaagggtgaaattattcagcatgatctatttgctaagccttctttcctgaatccccattttccttgggttcctgtgaagctacctacttctttgtttcttctctagctattccccagcctccttcttctagacctatgaagatggaatgaacatcttccacaattttgatcctttatgttttcatttctacttctatacctcccatagagatcttaactgctgtcaagctgttttccatgaatacccacaaatatttcttggagccctgaacactagcccaaagaccacccctgtgcttttaatgatttggtcaatatctcctaatgagtgatctaaaagcacctcagattaatcatgtttaaaagaaaatttattttccatgcatctattcccctcgcctattagcccacatgaatattacctcctctttctgctttccttgcatctatcaatgaccccatcagtatcttaattcttaggttgtataaccacaatagaactgtgaagttgaaagaatgtttatagataatttaagcctcccttcaggatgcataaatttcctctacaaagcacactggccaaactctctgtgaacccttagtgattgtaggctaggttgcgtgttcatagattttgctcagaagattgctagtattctcatgcagaagagtttaaaagccaatatcctagactactttttttctctattcctcaacatttttatttcctcatgcacaaattgtgtcaatcactttaatgttcctaaaatgcaaattttttttctttttatactttcctcaacttgagccgtacccatgaatctccccttgcactattgctgcacttgttcaagcatgcaagataaggatgctgccagtcagccctggagaaaaccatttgagagactgagacactgtagctcttagaactgcaagcctggttatattactttcctcttgctgttgtaacaaattataaataactttgtgtcttaaaacaacacaaatttattatctttatacttttataggccagctgtcctaaaataaatgtatttcttctagactctaggggagaattcatttccttgccttctccagctttcaaggtcacttacattctttggctcatggtctccatcctcagatccagcagtgtagtgtgtagtatcatcaaatctctctctctctctctctctctctccttttctgagaagatgtactgtgcacaagtcctatgacctgaactcatgcagaagctgaaggctatgtctaagagagcagcagcgggggtcactaccaggtgtttaattcctcttagagaagcttggttaaggacactttcctggtaaattttggaacatttctgctaaagatttctggaacagaacttttgcagttgccatcttctaaaggaaagatttatagctatgttaagaggtttatcattttctcaagatctttctgcatattcccttgctacattagagaggtacatatggtctcttcctccagttctaagtagataataatttcctctagtgttttggtttgctttgtctgttcattttaatattactcttatcagcttctaacttttctcatgtctgggaagagttccgaatgcctgacttttggcaaaatgctgacaactgaaatagaattgtagctgaacactctttcctcagtatttcccaatccattgcatatgatatgcctctgcttgtttaaacttccttgatgaagtgtttaacatcactctcttcttaggaatccttatgggttcactatggccaaataaatcatactgtaactctctgccattgaattgaggatcctctaggatctattctcagacctaacagtagagacttaacttcatatttccctatccataatttatctcccataaaaagatatcagagcttttaatgttgttctagtcaaattgttcatgtttttaaaagtacaatgtaaaaaccatgtgaaatcgttagtattaggtaagagtcactgttccttgccatacagtttcctcattaggtgtaacaatttatgttaatgaagcttgatagagtgaccataaataattgtaaatacttaggcggtcaaattttgctcaagccatgggaatcaggaacatatatttataaggttatatatgcaaaccctcatcagttactcacacccttcattcaaacctttgtagacaagtgaggggtcagtgctgccataacatagtcacttaacaattgtcttcatattctctaaatgaagtccaggctgaaatggtttcagatgaggatgaggaacttatttggaactggataaaggtcacttgctatgctttagcaaagagaatggaagcaatttgcccctgccctagagatctgtggaatgttgaacctgagagagatgatttagtgtatctggcagaagaaatttctaagcagcaaagcattcaagatgtgacctgacttgtttttgaaagcatacagtcatatgcgttcacaaagagatgatgtgaaattggcacttatgtttaaaagggaagtttttctcttgtaaattaagttccttatagattgctggttattgtgagatgcatagtttgtgaaaaatttctcccattctgtgggttgtctgtttactctgtggacagtttcttttgctcttaagttgaatcagataccgtttgtgaatttttgcttttgttgtgattgctttaggtgtctttgtcatgaaatctttgcctgttcgtttgtccaggatggtactgcctagattgtcttccagggtttttatagttttgggttgtacatttacatgcttttaattcatcttaagttgatttttttatatgttgtaaggaagggtgcagttttaatcttctgcatgtggctagccagttatctcagcattatttattgaatagggagtcttttttccattgcttgttttcatcagctttgtcaaagatcagataatcatagctgtgcagccttgtttctgagctctctgttctgttccattggtctatgtgcctgtttttgtactagtagcatgctattttggctattgtagccatgtagtatagtttgaagtcgggtaacatgatgcctccagttttgttctttttgcctagaattgccttggctatttggggtgtaagttccatatgaattttaaaattgattttttgagctctgtgatgaatgtcattggtagtttgataggaatagcactgaatctgtaagttactttggcaagtatggccattttaataatattgattcttcctatccatgatcgtaggatgtttctccacttgtttgtgtcttctctggtttctttgagcagtgttttgtaattctcattgtggagatatttcacctccctggttaactgtattcctaggaattttattcttttttggtgactttaaatgggattacattcctgatttggctattgacttttttgttgttggtgtataggaatgccagtgatttttgtacatagattttgtatctggaaacttttctaaagttgtttatcagctgtagaaacttttgggctgagactatggtgttttctatacgtagaatcatgtcatctgcaaacagggatagtttgacttcctctcttcctatttgaattccttttatttttttatcttgcctaattcctctggcttggacttccaatactatgttatataggagtgatgagtgatgctatccttgtcttgtgccagttttgcccactcagaatgatgttggctgtggttttgtcatagatgtcttttattattttgaggtatgtttcttcaatacccagtttattgagagtttttttaacatgaaggaatgttaaattttatcaaaagccttttctgcatttattgagataatcatgtggttttggtctttagttctctttatgtgaagaaacacatttattgacttacatatgttcaaccagccttgcatcccagggataaagcctacacgattatggtggattagctttttgatgtgctgctggattgtgtttgcaagtattttgttgagaattttgcatcaatgttcatcaaaaatattggcctgacattttctttttctgctgtgtttccggcagattgtggtattgggatgatgctggtgctggtctcatagaatgagttggagagaaatttttcctcctcaatgttttagaatagttttccagtagaaatggtaccagctttttgtacgtctggtagaatttggctttgactccatcagattctgggctttttttttcttttttttttttggttggtaggctttttattgctgattcaatttcagagctcattattggtttgttcagggaatcagttgctttctggtttagtctccagggggtgtatgtgtccaggaatgtacccatctcttataggttttctagtttgtgtgcatagagatgtttgcagtagtatcttatggttacttatggtgcagtcattggtaatatcctctttgtcatttctaattgtgtttatttggatcttttctactttattgctctagctagtagtctatttaacacattttttttttcaataaaccaattcctggatcattgatcttttgaatgggtttttgtgtctcaatttccttcagttcagctctgagtttggttatttcttgtcttctgctagctttgggtttgaattgcatttccttctctaattcttttagttgtgatgttaggttggtaatttgatatctatttatccttttgatgtgggcatttagtgctatgaatttatctgttaatgcttccttagctgtgtctcagagattctgctatgttgtatcttttttctcattagttttaaagaacttcttgatttctgacttaatttcattatttacccaaaagtcatttaagaacatgttgttcaatgtccatgtaatgacatggttttgaaaggttttcttagtcttctatgtttaatgtgctgtggtctgatattatgtttggtgtgatttcggcttttacatttgctgaggattgttttatgttcaattatgtggtcagttttagagaatgtgccatgtgacaatgagaagaatgtatattctgctgtttttgggtggagagttctgtagagttctatcagatatagttgatccaatgttgagtttgggccctgaatagctttgtaaattttctgccttgatgatctgtctaatactcttggtgaaaagttgaagtctcccactattgttgcgcatgagtctatgtctctttgtatatctctaaaaacttgctttataaatttgggtgctcctgggtttggtggatatgcatttagatacttaggtcttcctgttgaattgaaccctctatcattatgtaatgcagttttttgtcttttttttaatccttgattgtttaaagtctgtttcatctcacattaggagtgcaactcctgctcttttgttttccattttcttggtaggttttccttcaactcttgattttcagcctatggatgacatttcctttgagatgggtctcatgatcacagtataccgttgggtcttaattttttatccagctttccaccctgtgccttttaagtgggggcatttagcccatttatattcaaggttagtactgacattcattcattcttaaattcacattctgcatcttgtcactactaaaatatttaagcttcataggaaatttcaatgatttaaaaggtgaaaagacttgaaacttctattatatgtttcttgggcaagacctggtctttgagataaaatcttttgactgctctctgcaaatgctcctataagcaatagatatatacataaaaatacgtgtttatttttccttcatgctgctcacagatcatagtacaaattgccaacacatcatttatgtctttatctgtactcactggtatagccacaactgaacctgagagaatactgtaggtgtttagtttcccatgttattcatcaacctgtctgcctggaagaagaaactcattgttgtaaaaaaaaaaaaaaaaaaaaaaaacttcagtttttcagacctccagtgagacaaaatatcaagttcacaaaattccagcaatgtaaattagcaatttctccagcacctcctgttccacaataataagcactcaggggagttcataagtgttctcagaaaataaatgggaggttggtgacttctacataaaatctgctgttacttagaaaatgcaatttagttaaaaatagtattcagtgacttaggacttagggacacatttagcctaaactaatttaaaatacttatttcaatctagggtaaatatggtaggttaaagagtaattcaaaaggtttaattttcctctataatgtaacacaaatatttttagactacattgaaacaattaaactcaaatgaaaattctctttaagattttattaaacaaagcagagaaggagggaagaagggaaagaggaaaaaaggacttaagtttatcttaaacaagatagacttgtttaaggcttgctgtatatcttaaacaaaatgctagttgtatattgtttgctttataaatcatacaggaactgaatcgggtaataattagagagtttttcctacacaatccaagcactaaatgatcttatttgtattgatcatgtccaaagagaagctgctacaatcttttcttattttcattacttctcatgtgtctgggagaaataaaaattaatcaagggtaaattagaaggttagcagctccaatacatactttgaaattcatcgaaaatacttcattctttcatcactgagcaataaaaaatagtttgtggactggcaatgatttaaataatttctctcataagtaatagtccttcacgttctacctatgatggcagattttatgtgtcaacttgagtgggctaagggatacccagaatgctgacaaaacattgtttctgggtgtgtctgtgaggatgtttccagaagaaaatagcatttcaataagtagacgaagacctaccctcaccagtgtcagtgagcatcctgcagtctttgaggttccatatagaatgtgaaaacagagaggaaaaaaaaaagggaatttgctcttgagctgagacatctatcttctcctgcctttggacatgaaagctcctgattcttggcctttagactcagactgaattataggaccagatttcctgtttgtcctgtttgcaaatggaatattgttggaacttctcagcctcaataactatgtcagacaattcccataatatataccattttattcatccatatatatatatatatatatatatacatatgctattagttcttttcctctgcggaatcctgctacagtacctgaaggcaatattttaatggatttttcaaaactttcatagtgaaaaagaaaaataaactatattgacaaatcttttctattgaagaactcctggaactgatgcattgataagaatgttattttaaatgtgaaagaatatatttttgcttatttgaaaatactttaagaaagcattttttaaaaagcagagacatatttaatttgtattactttaaacatttgtaaactctgtttaaaaattccccaaaaccaaacaggaaaaggatatttaataataaagaaaattttaaatctttcatgtatttcaggtgtcattagctaaatttttgtagaatagttggacaccttctaagataaaaaatttattgccttctcacttgtgtaagtaataaaacaacccaacaaagataaatcatagtatatcttaatcagataaacaatatctttatatatcacaagcaaactttctaacttttaatcttttatccataagttgttcacactttgtatttttaaatttgatattttgtatccaaagtacatctttataatatttatcatttacttatttgttgtctaaataaactaaaatgtaataatttcaaggaattacttataccaaagccttacaactgtttgaaagggaaatttttataatctttctggattctacccatggtcttcaaataatgaaatataacatgttttcatgtgtaaggatagagttggccttatgttatctgtggttgtgctatcttatctttagagaagtcgggaaccatggtactacacgtggccaagagaagtattaaatgtactaaatattgatttcttatgtgctatctacggtccatccaaatcttcctgggagacacgtactaggttggttacatcattattaaaaatatacagattgacattatatatatatatatatatatatatttcaatttatatagcctagttttagctgcatgacagtaaagtataaaagaccccctgcgaacgtgtgctcaaagtatctcacacatatcttagggatacttttcacacattccactttatctttgtctagtcctttgtaagctctatgaatcctttcaatatccaatcctgtataatgcctattatacagttggcactgtgaacaggatgaatgaaattacgtttgatacaagtttgtttcctaagttactcaagctgatgggaagagaacatattagtgaactgtcaatcaaaaattttgtattttagattctttaagctgtttagggatcattaacaggaaaaaaaaaacccacaaacaaacgaacaaaaaaactgcaaggctgtcagtgaacattttgtaaaatacgagacattattccagaaggaagtaagaaagccacaccactctttgatagtaagaggaattctttttctgaggatgcaaaataaagaaaagactagcaaattaggattgttctaggacaatattaacatataccttagtttcacatctttgaccatattcttcatgtttggctaaaagagactccaactgcttggcctctttctgaacctactattaagaggaaaggataatgtgaggcaggctagtatggacctgtttactccgatttcatcaaatggagcttaatgatcagaaaatacttaaaattatttataagaaagaagacaagattaaaatgatcaataactttgagacaataaaatcagtgaaagtgttcatatagttcacttgaaataaagaaagtaatcctaaaatttataaggaatcgcatgaaaaaacaaagagccaaagcaatcttgagcaagagtaaagctgtaagcatctcaattcctgatttcaaaatatatgacaaagccaaacaaacacagaaacaaataaacaaatcctgcatgttctgacttataagtaagagctgaacaataagaacacatggacatggggaggggaaaaacacacactagggcctgtgaggtgggcagtggggagggagagcatcagaataaatagctaatgcgtgctggccttaatacctaggtgatgggttgaaaggtgcggcaaaccaccatagcacatgtttacctatgcaacaaacctgcacatcctccacatgtattccagaacttaaagttatacatgtatatatacatatatatgaaatatttatatagttttaatttatttttactttttatatattatagctttgttataagttactgtaataagaacaggttgtttatcacatcagactcttggagataacatactgaaaccaggtgtagctctcaaacacctaaaatgattttattcgaaaacatggccttgcaataatagatactggggactgctaggagggggagggaggaagggaaggaaggcttgacaaactactgggtaccatgctcagtatctgagggacaggatcaatcatacaccaagcttcagcatcatgcaatataccaagggaacaaacctgaacctgtaacccctaaatgtaaaatagaagttgaaattattaaaaaaataaaaagcagccatggatgatgacatgatttatgacctaagtgatatgttgagataaatcctgagatacaatgggcttaaaatatcactgtgtgtccaacttatcatcattgcaaatttttttttgagagcagaaggcatagtcaaaataaaaaatatgtagcaaactaaaatcaattttagtttaggaattatttggtgagttcacaacagccccaatattctctgagtgtgcttatggaaagttctttgggaaaatccaagtaaactatatttggaaattcttgaggccaagatatatactcaatatgactggggccaagatatatactcaaactgtaatgaattaataaaatcaatgacaacaacaaaattgatcaaaggaggggaggaaatattttgctagtgatttacaatagctcactaatgtccaaaactcctctggaagcattttgtacaagtttgtctacattatttctttaaaaatgcctagattgattatttacacctgacttatgtggttacacagactaagtttaggtatgtggagaataaaaaagaaaagcaggcagtggagaaaagaaaagtgggtgaaaatgcccctcagtaaacatgtgaaaagctatgttgggtatatatcttggtgcttgacaatcctaggagaaagcatgacctctgccactgagaacggaccctgaaagctttaactagatgttttggatgcgtttgatatttgcatgtttgcaggtgcttgctttctcctgctaaagcatgctatttgcctttattaaagttttatgtaagtaatacctggagtcttgtgaatccctttgactctcatgttttataaaacttcttcatcttacaaaattcacttcttatactctattgttcttttgtattttggaaatatttttggtattttgaagttatttgttgtataatacaaaagtattaatgtaaacactcggaaaagcacaagatataacaaatgatctatgctcttggttttcatagaaccagataagaataggacatcagtgtgatgtatgaaagaaggagtggtattggaagctgtctatcctgtttttggtaatgaaagggtatgttatgaggagagaagtttaaaaaataataaaagttactcttatttttattattattcttctttttaatactgtacgtttttctgctttttattactctataaataacaatgttaaataatgtttatgataaattactccttcctgttggaattgccgtaactcccacatggcacgccattagattctagtccagcctttgaaatttatttaattagtcatgtcaccttaagtcatttttactccctggaatctcagtttctctatgtattgtagggaagacaaaattttacctctacacttttaggatttttcagctgggcctcaaaattaaattaatgtaagacaaatcaacaggagaaaagcatagaaatgtatttaatataagttttacatgacatgggagcccttgtaaggaaatggaagaccaaaggaaacagagtcaaacacttacattctgaattagaaaaagaagatacattgtgaaaatttgataagacaaagggcttggtccaggatacgtaactggggagagaagtgcctgggaagatatgggttgttggcacagatttcccttagtctcaacttctcattcttgatgttaagaatgttactttcctcgttgtatagggagggcaactttcaaataggaatgtcatctagctgcttttaagaaacagaatgaaggtcaaagtgagctttctgcacctgctatttttcaagtttctttgcttcaaaataattcttatgctgaagtgacttatttgagggtggtgtgttctgaactcctgcagcatgaaattaggaagttgaaacaagaagatgttgaggactcttcatattcaagcatactaaaattgtgttacaaacctcaagtatgtccaacagatgcaacagaatgctggaaaaagtattttattcatgactgcatatcaatgttgtattactaaataacttaataacctaaggtctacactttgaaggtgttaatattttcaagccacatttaaaataaataaaaacgcaagttacataaaaaaatgtgtcctcaattttaggggttgagttctgtgctgagtgatgagggaccccatgatgtataacagacaaccactatgttatctgtccatattgttgacagagataaaagtccatcttccatgtgcattttaatataaaagtgataagcatagaaaatgtcaagttaaatataacactggtatttaattatgtgaaagttttatttcctgttgactttagccaggtagaaaataatggtacaaattggagggaatttttaaatatgaatctggaaaattttacttagaatattcatttttatgtgctatacaaaagttgcctttaattatagatgtacttatctttcgctttagagttttaaatattggctcatttagcttgtttggttttcttgataaaaatatataaaccagagcatatcaacaaattctgcaggatctctcctatacacaggttaacagattttgttttgtaaaactcgttttgagaatcttgtacaaaaatttccgagtgttttattgttccaaatttaccagagactaaatgttcaaaagtaagtgataaacaattaaacctgtgttttctttttatccattgatttaaaaaaacaaattgctttttgaattattttagacagaattatcattgcttttttaaataatgttaaaatccagtttgatggcttatacagcatttctattaatatgagtataatagaaaatcatttttaatacagcagaaaaaaaagtcagttaagacatttcctgtgacaaatggagaataactccagtttgatatttgtagtcaatttcaaacatctacataacttttcatttgtttcttattttttgaggtatttgtattcaattcagtttctaatatgtctttctataaaacctaacagcactgaaataagttttccattagaaaattatttaaagatggaaatcctaaaagaaagtcaactttctctcttcacccttagcttatcaactctttttggtagtgacgtgaatttaattatattattaggaggttatgtgttgagatttttgtctattatttgtcttaatcattaaatagtcttcttgatgtcagatttttcgccaagtatcagaactatttctgtaagaaaaaaaattacgattagaggcatttaagggttggaattaagtttcagagattttatcacctttgaatcacaaagcacaggaatttaataaaaaatgctttgttctaatgtgaatggaattttaagtaattcatcactgagtgaaaataaatttctttctttttttctttttgatgatagtaaaccagtactcaaacatccccatatagctgtttaatatatttcagagatttaaaaaaactctcctacctgagaaatttttcctatgtctctaacatagacataaatgcttcatttagatggaattatctttttttcttcaaagaaatgaattttatattaataccacttacatgttactgacaggtctgtagtagttttatctttcactaattcaggttctttaagcatttctccatataccttcgctagaaccttgtcccaattttcgctgatcaatttactcatgattccgggtcaacactaagtaattaagaaattaactcactattttgtatttaaaagcaaatctattttttaataggattttttttcccgttaaattggttttcatttgataaaatattcaccttaccaacacttctctcttttatatgtgtttttttttttttttttactttgaggtaatagcctaattattatgtaataattttaagtatttttatgtcaataccatgagggggaacctgtgatgagttatatcaaaatgttagtaaaataagtttatgtttatgtataaaaggactacaaatgtaaacaataattttattaggtataaaaatgtagattttaatctgttgggaaagaataagagaaaatatctgtatactttaacgttagcatcctaatgcttaaagcttggaatcatttggggagcctgtgctgaacacactttcagaatataaaaccgtaattttaacacattcatatttgaaattgagccagcacctctgattctgttatttttttgcaaattagtgtgcttatatcttagcagttgagacatgcacatttcttattcacttctagtatgaggattagagcaaattctagttgaaaatttcacataatgacaactataagaactaattatctaatacgcttttttttttcttgccagttaaagcctgggccattatgttatctgatgggtactttaattagaggcagacttattaataaaatttaatggctatcatataggcaggccataaaaagctagctattattgaaaataagacattcagcattacaaatactaagactaattttattctaatgctgtgtttcttgtttttgatattctttacaattggcctaaaacttttatcaacaaaatagagacttagaaaatacattacttgtaatgtcaccaaaaatctgcaaaaacgaactttccacctttgaaccagacacatctttaacattaccataaaaatatagagaagaaaattattcccaatctgaaaccaacttcattaatacaatagcatcaaacctaagataacaactgagagattagctctgctaacctttcaatgttcaaaaaacttcagtttaagcagaaacctacctatttattttcaatatttcctacatgttatgcttcctaactcaacttctaaatcaaagttgtaacaggcatataacatcgggtttaaaaacataagcacatttaattgaaattagactatatgattgagtagaggtatttgtaaatgctttgctacttctccagttgagaggtagagacaatattctcacccttggatttgggctggtcttagagagttgttagcccaaaacaatgcaatagatgaccaggccttttaagaacttccaagctagaacttaaaggactttgcaacttgggcctgggctctctgaaacattttctttagaagcccctaactgcaatgtataaattctaattaagccatgactcccaactgagtctagcctgctagccataccacagcctgagagtaaacctgtcttggaccatctaacccagcccataggccaagtgaatactgctttgtgaattgctgttggaaccatgtaaaaataaacaacaaaaaatccccctagtttagcccttcctgaattcctgatccatagaatcataaaatagaatgaatatgttattcttcaattcctctgaggcttggaggtaattaagtagaacaagccacttcctttttgggagggtgggagtggattcaggttatacagctttagagtagttcacagaaatacttttatatatcacacctttctcatattcacagacagttctaatcactttactgaaattacacccctgtcacagatctaacagatactgcttgattaggatgagatctggtaggttaaaatgtgcctcagaaaataggtgatgaaaatgtgtgataaggattttaaaaaattacacttaattcagaattacaaaaaggcagaattttcacataaactaattccatccaatttttagattacaaagaatgtatacatattttgtgtctaaatacatacagatacatatgcatattttgtaaaatagaacatttatatcaaaactaacttcacacatttgaattatgtgtcaaacaattgaattattgttgtgacacacacaatcatacatacacattttgtatgtgtagtatgtgcatgtgtgatgtgtggcttgtatgtatcataataatttgatggatttgttatacttgaacacgtataaaggttagttttgatacaaatcttctctcttacacatacatactttcaattagttactaaggttttttctaagctgatgtggatctttctatcctggcctttatccatgtcagtttctagaactattctgccaactcaagcctctgtccctttgcaaatacttgtccctcagtttagggacatagttttcttcatcatgctgtgcaactatacatagttttcttcatcattctgtgcaacagttgttttcaaaaggtttctaaagtacattaacttaaataaattaagaaaagtttaatttatttgatattggctatgtatattgatgctacttagcatttttgtgtatagggaagactatgcagctagtaattttgtctaacttatatttattaaatttcttatcggtctcctcccatcaggcccctcctccaacactgaggattacaattcaacacgaaatttcagtaaggacacagagccaaaccataacagtctgcttgtttttccattaccaaaccctgtccgagattggtgagtttcgtgtgtcagcaatatagtattatttttccagcctgctcttcaattgaaggagtcgtactcagagaatgttagctctatgaagattgtgcttttgctatagtttactaatttaagttagtctcacttcaattagttttgaaaatatttaattacatatgttcattgaaaaaagtttataaaccgttatatattatttatacatctacttataaaggctgatgttgccagaaccatcctccccttccctaaagaaaaataatacacatcagctgtcacttgattaaaatgaaacttaggataaatccaaaacaaaaatgtatttaaaagataattttgtttttcaaaaaccttgttaattaattgcttccaacttttgtgtgctagctctgcccgtgggttctatatttataaagtttccaggctcagctgaagccctttaccactattttgacaattgatggtgcaaaactaaattttcaaaatattgtcaattgtctataattcagaaatcaaaaattacatctaagtataaaaactggcattctgatatttttgagtgtatcaacatagctataactttttctgagttgagtttacattatatattcttcactctatcatcttactttttaaaaaattttttttgagacagagttttgctctgtcacccaggctgtagtgcaatggcatagtcttggctcactgcaacctctgcctctgggttcaagtgattctcctgcctcagcctcctgagtagctgggattacaggcacccaccatcacacttggctaatttttgtattttcataaccaagcatttttttatatctagttatttatctaacagtaaaacaagattttggaattagagaaaaggctcacagagcaagtttagcaccagttcccataccgtggttccccacgtggtgaaagataggacttgatgccatttgtgtgtgcagtagggtggcaatataggaaaaaattctctaagttatgaaatttggagcttttgtagcatgacaggtgcattttttgaagagagagataaatcctttctctggagtgaaaaacatgaaatcctctttggggaaaggaagggaatatctctaagtttttattttcatttgaaatacaagcaaatgtctccagggtagaaaagctccagaaaaatacaccgtctctaaattccaaggcttgtttttcgttaagccatactttaagcttgattgccattaatataatatttaaccacgaacaaactttaaaatgttcatggagagttgtcagcaagtctccagaagagggagttggggggaaagagagagagagagagagagagagagagagagagagaggagagagagaatgctaaaacagacaactcaactaaaaaaaaattaaagtatcagcacttagaaattgaaattaccagaccagacatgttatataacattaacatgttttaaatatttggagtctatacaaggtaaagtataaaacactgaggaaagaaacaaaaaagaacacacccaaaaatgaaagggtattccatgcccaaggaataaaaaaattgatattgtcaaaatgataattttaacaaagcaacttacaaatcaatgaaacccctagcaaaataccaagaaaattcttcacagaaatagaaaaaatcttaaaatgtgcatggaaccacaaaagacctctaatagccaaagcaatcggagcaaaaagaacaaagctggaggcatcaccctacctgacttgaaaatatactacaaaactatagtaagcaaattagcacagtactggcataaaagcagacatacagaacaatggaacataatagagaacagatataaactcacatgtttacggccaactctttaaagacaaaggtatcaatactatgcaatggggaaaggacagtctccaataaatgttgtaaagaaaactggattaccttatgtagaagaacgaaactagacccttatctctcacgatatgcaaaactcaaatcaaaatggattaaagacatatctagccaggtgcagtggctcacgcctgtaatcccagcactttgggaggccgaggcgggcagatcacgaggtcaggagatcgagaccatcctggctaacacggtgaaaccccgtctctactaaaaatacaaaaaaaattagccgggcgtggtggtggcaggtgcctgttgtcccagctactcaggaggctgaggcaggagaatggcgtgaacccgggaggctgagcttgcagtgagccgagatggcgccactgcactccagcctgggcgacagaacgagactccgtttcaaaaaaaaaaaaaagacttacatctaccacctgaagctgaaattaccagaagaaaatacaggggaaacactctaggacattagtctggggaaacatttttgtgtaagacttcaaaggcacaggcaaacaaagcaaaaatgagatcatcttctacacaataagaacagcagcagcaacaacaataacaaaaaaaaagcaatcaaaagtgaaagacaatccacagaatgggagaaaatgttttcaaactatccgtctgtcaagaggttaataacaagaacatataaagctcaaacaactcagtagcaaaaatactaataatctgacttaaaaatgagcaaaatatctgagtagatatttctcaaaagaagtaatacaaatggtcaacaggtttaagaaaaaatgttaaaacattagtaatcatcagagaaacacaaatcaaaaccacaagaaagtttctgacccagttaaaatggtttttatcccaggacagacaataagagatgcgggtgacaatgtgtagaaaggagaaccctcatacattgttttcgggaacgtattattacagctactatggaaaactgtataggaattcctcaaaaaactaaaatagagctatcacatgattctgcagttctactaatgtgtatttatccaaaagaaaggaaaaaaattgtcaaagagatatctgaacttccacgtttattgtagcgctactgacaatagacaaaagatgaaatcaacctaagtgtccaaaagttggtaaatagataaaaatccttagtgttatatacacaatggactattattcagccataatataaaatgaacaattctgtcattttcatcaacatgaatggaactggaggttgctagatgaagatgaataaggcaagcacagaaagacaaatgttgcattttctcactcatatgtgagggcttaaatagtgaatctcatgaagctaaaagagtagtttggtggttatcagtggcaagaaaggataaaagaaaggataggatgaagaaaggttgattagtaggtccaaatatactctttgatataagaaataaaacctagtgtatgataggtaaataggatggctatagtttaccatgatctattgtgtgtttcaaaatacctagaaaatagtaattcaaatatttctagcataatgagaagccaaatattgcatgtgatggatattccaagtacactgatttgatctttacaaaatatttggatgtgttaaattatccacaggtatcctctaaatgtgtacctctaatatatatggaaacttctaatttagagaattgacaatcagtttaaagcataagaattaaatagacaccatttttaaaatatcaagctaattgtcaaatagaacttctagaaatataatttgtgatcattgcaattttttaaatggatgcattaaatagcatattagagacaggtgaaaaaaataaaccaaagggtagaataaaagtaagtatgctaaaatcagaacagatgaataaaatacagaaaaaaattaagtgaaatataagttaacagactgtaaatggcactctctgattagctctaacaaaatccaaaagaagagaattgggagaatgagggagaagtagtttcagaaagataataattgaaaaaaatttccgaattggtaaaagacatggatccttacaatccagaagcataattattttaagcagaataaacctgaaaaggatgtcagggaaaatctcaaaacacttaggcaaaaaaagtagattttaaatacaacagagagaaaacactgattaccttcaaaggagtaaaaatgaaactggtaacagtttcacaactataacaataggagccagtgaaatagtctaatagccagtgaaatcattattataaggaaaaataacctaatttatatgttttcttagatgtactctaaatttaaaacatatgaaatagctattttgttttgttctatggacacataagaggtactaatgaaaggttattagaatctcttatgggtccatagaacatacgcacacaaaaatttgcaaaaactttaaatttgtatatttcaagagcctgtttcttgctctagacgtgcactctgcgattcaagctactttcgggaaatgagtgagtaattatcctactttttttagatttcttgtaatatatagtttatagtgcctttcttaagaaaatcaatggtattgattttgttaaaggcatcgtcacttactacacacacgtgctaagacaatttacatacaatattgtttatcctttttacagatggttcataggcattccaaacatccactaactcaagtaaataatgtttgcattagattcatacgtagacatgaagaaacctttttataaggcataatatcttggttgggggaggagtggaatggatgatagatttactgtccagttactagtaatgctttttgacgtttcaaaatatgtttctaaagaaatttgtacagaacagtgattctttaactttagagttcacatacaactcagtatggcaaaggatgtgttaattatctataaaacctcttctttctagctattgaacattttggtacatgtaatatttatttttttaagtgaaatgatctttgcttcaatctcttcacccaaaattgactatatggtgagagttacataactgttgatgacgttggccatgtgattagattgcctgcctgatttgaattttagtttcaccactgtcttgcttttggacaaagatagacagtccctagatagacatttttctctataaatatttagcctcatttttttcccatacctaactacagaataagaatagtagaaacctcttaggtttgttgtcagcattaaagattaaattaattttcatcatttaattaagttactaaactattcaagaactattaacaatcattattattgttctaaatggttgaccactggtgttctgtctcatttagaagagctcagctacttcaaaacagaattagtgctagctgagtgaattttacaggcaacattatttgactaaatcaagggtgtatttatttatattacttacgtataaacatctcaattctgtactttatataagtgaatatatgacttagaaaaatactcatgaatgtattttgaaaacacatttagatattaaactagtaatcttaaacatatacatctttgattgaaagacatgtgttttgatctgcatgtattcacaatttgtgttaaatttcaaaccaaaaatttcttgtgttgtttttattttgctttgaaaatattttttaccaaaattaaaatgttataactaagggtagtcctagtaaattaaaactttgcaaatctaataatacagagagctaggctaaaagaaactttgagcaaaatgtcagttttgaatagaaattatacgtctgctggcaacatccccgcgtattccaaaaccaagagacaaaatcatatagaattctgttcactttaaaaatagtattttctcactaaaaagggaaaattggtttgtgcaaattacttctaatatgatataattttatacatcagacaaataaatgcagtacaaatttaatgttaatttatatagtcaatttttaaaatattgaaaaataatgaatatttcataaatgtatggagatttaatctacagaatgattaaaatgtttatagtttttcagtttcaaagatggataaaaatatgacaggaaataaaaaataaataatagagatcatctcgctgctcaaacctcatttcaagatatttcaggttttaacataaaaacaatttatgctataatgttgcctacagaaagtagttaactgctgtgaagaatgtttgcaggtcacatttcaggaaatatatttaaaggcttattcaccaaagtaattttaaatcatggtcaacatattttactacattcaatatgaaacataatttaacttgttctagatcattaaatatcattactataactatttatttttgcagtttccttttttctaaaccttgaccagtgattctcaactaattctgaagacaattgcctttatattcattcttgctgtcaatttatgaatagttttattgaatgttcctttgtcattatcttaggagacaagtgattacatctcttactgactatattatctttggcaggttaattatcctttctgcattagagaggcaaactttatatatgcatgcatgcatgcatgtttatatgctgagtagtataaattacttactacttgacaatctttattcaaacattccatactacttatctaattccacaaatattttaaaaaatattttgagccaggaactattttagatgctgaggagttatcggtgagcagctacacttttgaactcatccagtatacattttaatgggagaggttttggccttgtgtgtgtgtctgtgtgtgtgtgtgtctgtgtgtgcgtgcctctgtgtgtgtgtgtgtgtgtgtctcttacgtagtaattagaactgaaaaataaagcaaaagacaacggatggagagtggcaccattttagaaagggtgataaaagataagcacacttaggaggtggcattggagcagagatttaaatgaagtgagtgaatcacatgcataacaagggaagtagtcagaattgagttagctgctagcctgattgaaggggtatacacaccgaggtggagaggaaggaggtaggaccagagaaataaccatggctggtgtcatagaggtttctgtagaccatgaaaagaattttggggttttcctaaatttgataggaatctagagtgagtttcattagaaatattattagggatgcattggatttaatttatggttattttcaagtattgtggttactgaaagcagtcctacgacaagggtaaagaagttaccaaacgcccctttatcacattaaacaaaatccacttgctgaaatttaaacttacttcctttcattctagattcagtcagttggaaaacacttttttagcatcttggtcttctgtatataaagggtgctttttacttgaagggttgcaaagctttttccttttttttcctatttgatttcatccctttctatgctttctttaatttaatttgagagggagaaaatgtttggtgctaattaattcaattttgggtgtgtggttttattttgttttagagcatagcttttattcttctacatggaaataactatgataacaatcaagcatccctcatcatcctgtgggataatcttactgaaaatttgaatgtcgctttgaaggtaaattatgatttttcatgactagaatccttgctagaacaaccgtggggatttatagaacttgctttatagagatagtgccatactctcttttccagaaatataacatttatactcacaagcaaacaagtatattacaagaaatgcaagttttttgtttgtttattgctatatcaatttttcctataaaaagacattagatttttctttctttaattatttattaaatgtttgtgatgttccactgttctaagtgctggagaaacagtaaaaaaacaaaaacaaaacgggaaagccccttcttttatagagattatataatttatacatttcaaaatacactgaaacttttttcggtgaggagtgtatataacacatttctgaaaatactaccatcctctcaattcattcataaattgaactaatgaacatgaatctcattagtcatccgccaataatagtatcaactagaacatgtattgtattctgaaaacgtaaaaagtttttacaaaatatgcttctctctcaaaaattgatgatctacaataaagctaaaaatttgctattctatgtaagaaaattcaacagtatcaagatttctgtaatacccacgagtcttgatttactatatgtgatggtctgttcaattggctaagataaagaaagcaccttagcaaattccagaactttatgaagaagagcagctcactctgttttgtagaagagagccaacacttgatgttctcaatcaatgggaaagggatatgaaaacaggtcacatatgcttctgtccttaagcaggtggttagtaccattcggcattttcataggcttaatacacatttcccttatccagatactgacagaaattattataagtagttctggggagggcaattagaaaccaaaatttattccacttggcatttattaatctttgctaaactcaaatgaatctctataaaatgattataatttctaattcataatttctgtcaaattgcataatgtaagggcttcctcaaaattctattaaaagctatataccacttcaacttgtgcatttttttattgtaaactggcctttaaaaatatatttttttcatcttttgcaacttaaagctaaaaatcagaaagttccagttcaagaggtataaaatgcactcttatttctaatatatagtcattgctagcccttaaaacttgaatttgtaattattgttcagtgggggctttacagtttaagattctaaagatttttcacttcaggatggattctagtggaagatctcaggtaagaatcttatatatttataagaaaaaatgtaataagccaaaatgcatttttgaccatttgattttagttattaagacaatgtatttccagtgtgatttttgtcaagaaaatgtataaatattcagggtagtaatttaagatgcataacgaattctttccataaaacgtgaatttttttttttttttttttttttttttgagacgaagtctcgctttgtcacccaggctggagtgcactggcgcagtctcggctcactgcaacctctgcctctcgggttcatgccattctcctgcctcggcctcccgagtagctgggattacaggcgcccaccaccactcccggctaattccacaaaaggtgatttttatttaattcattgatagatatactttgcttgttaaagtattatcaaaataaatatatttaaaagtgtttatttgaatttaattattccttgtgaacatttaaagatcaatgaaagtagtataaattgttattaagcaaagaaataaaaaatattgaaaacaaacactctcaaatgtgcacaaagagagaaatttttccttttccaaaattatatgaaaataaaaaagtcttcattaagaacagatgaacatatttttaggtagctataggaaagaataatttttctaagcaaacttttacgtgagttctaagatttccaatgatataagaattatccttctgcaaccagaggtggtaccagaatccagcttagacatttatcgtatcttcaggatctctctgtgactttggtattttacagtagagtatacacgtgcaagaacaggacctgtttattacatgttatttgaaaatgtgttcagagtaatcctgaatgagttgcttgaaatacactgatttagtttttttttttttttaacttttgttttatgtgttttaattttaagtgacgatttagtttggccagaatgaaatgcaggagaatgtgtctagaacgggaaacataaaaattaaaatgttcaactttctcaatcacataatctgaattggctttgaatgtctgagtacgtatttttaacttcggtgaccatgtacctctgagagctaaattggagaattcttgaatgttatttatcaaataattttagaaatccacatagatcatgagcatccatttatgttgttgtttgctatgcactcagaatcatggtattatgtgaagcagtatgtataactactatatccctttatagcttataattaaatttaaaaagcatatgtaacattcttattttatataattaatgttacttttttgttattaaatatttttcatagcctttagaaaagaaaatgtatactcaattcatctaattttgcatatatctttttaaaaacaatagatgtgtgttttggttttatggacagccacagtggtgtgattgatagaaagttattgtcagacaaaagcacgtccatacctgtgatagttaatattgagtgtcaacttgactggattgaaggatgcaaagttaaggtgttgccaaaggagattaacatttgagtcagtgaactgggagaggcagatccaccctcgatctgagtgggcaccatctaatcagcaggcagcacggctaggataaaagcaggcaggggaaagtggaaggggtagactggctaagccttctggcctccatctttctcccgtgctggatgcttcctgcctttgaacattggacttcaagttcttcagcttttggactcttggacttaaaccagtggtttgccagaggctctccggccttccgccacagactgaaggctgaagtgtcgacttccctacttttgaggctttgggacttggactggcttccttgctcctcagcttgcagacggcctattgtgggacttcaccttgtgatcatgtgagtcaatactccttaataaactcctttcatatatacacctgccctattagtcctgtccctctagagaccctgactaatacaatacctaaactcaatatctggcttataaaatagaaaatataatctctcaggattagtccaaggattaaataaagtgccttgtatgtgacatgaacaattgatattttcccctagaaataaagttttagttagataaataaatatgcttactcaatagtaaaaacgaaaggcaaatatatgataaaggacagcataaatgtttgccaggtttccactacttgttcttttaaaacagtattccatttagcatatttttaaaatagcatttcactaatttttttaggcagacaataatttacatttggaaatgaacttgtttctctgacagcagatgtatgtttgaaatacttcttccttgaataaaacttgtgaacagattaggaatctaacttacattcagataacaaagggcatgagtgaaataatacattcaaataaaatataaaggcatgttcaataactacctgtaatgtgataaatagaagtcattaggaaactatgaagctacaatgtgcttagggtttctaggcataaagggaaggagtcatttgatttctaaaactcaaatagaaaagtgcttttaataaaagagatgatgataaatatattctcctctgaaaaaactaacaatcactgagcgagaaataaagtaccatttattttaatcaaaacaaggtttcctgagaatctgataagcaactatagtttgggataaaacactggataaatgtatgagtgtcatgctctatttatgtaataaataccttttggaaaatgcacatccactaaagtgattttggatgaatcatagtttacatacacaaagggattttttatttgaattgcaagaatgtgcattatgaggcaaataatttgctttgagcaagaatgtcctttttgttttcattttaaatatggatttcacatactgtgtttatttcaagagaaacagacccattttgatgaataataggtatttctgacataacattctgacacatttaaaatacttatttgctaaacaattatgtacattatatagtgttttgtactcatgattaaaaaagaatttcaagtgatagtgtatgaaaaaattactggatgccaagtaaagaacatgctctaaaaatagcctccttaatacagaattttcagtaagagactcacagaaacaaataagcatatttattaatatttagcaagaatattaagaataattaataatatgtattaagacttataatagataagacttatttttattattttccaacttacacactcatacaggttattaattcatttttttctgattattgtctctggttattaaggtttatcatgtgagataatattcttaagcaacaaatatacctacagaaaatagtatagtttgtataaaaaagaaaattttaattgtgaaaaaggaaaagcataactgaaatgaaattattatatataaatgtcttaagataatttaagatgctaaattggtgttaattaaatcattaaattaactttagtaattgaattaaccatgaagtaacccttatgtaggtaaaagtaagcaatttgtaatatttctgcattatgaagagatttataaatagaaacaattgcttttattattatactagtttctacagtcccccagaaaggagtcaaagaaagttctcaggacaaaaagcccaaaacttctcaattttgttgcttcatttagagagcaaagactaagcctcaaatttcaggggtttcactgtattttcagatctatctggtaagactaacagcacatgtagtttggaatgattatttttctgtctttaacaggctttcttattccttactgctatttggtacatttcacagttcttcatgaacatgaacagttttattttaattaggtaatggagcagttctacatcaaggggatccttcaatctacttacattgaatgataggaaattatctgcggagatctggggtttaagttcagggagtgagcgtggcagcactgaatctcattttagacctttccttagctaatttgtaagcaaatatgagatttcctttacttttagagtcctaagtatttagtgtcctctaattttctctcgtgtaaaatgaaagctttgcaatagattatgtaaataatttttaaaagtttcctcacagtttccatttaattaagtccaattccctttctaaacagagactagtttctgatatcaaattgttccctgtagcattattatttatacattgtccaaacgatatacaaaatatttattttttcatgtcattatttgccagtttaaaaattattttaacgttttgggtttcataatgtactgcacttgttgaatttagagctagacgactaaagagtcatatatggaaccagcgatatttggaccatgaagaaatattaaattagtagcagaaactagactatttatagaacctatcagtgctgtcacatcagagaaaaacttctctgtacggttctattgtttttttgactacttttatttgtatatatttatttatttatttatttatttgagacggagtcttgctctgtcgcccaggctggagtgcaatggcccgatctcaggtcactcaacctccgcctcccaggttcaagtgattctcctgcctcagccttctgagtagctgggattacaggcacgcgccgccccgcccggctaatttgcgtacttttagtagagacggggtttcaccatattggtcaggctggtctcaaactcctgatctcgtgatccgcccgcctctgcctcccaaagggttgagattacaggcgtgagccaccgtgcctggctgactacttttatttttgatgaaacttcatctactttaaaatatcggctttccatttttcaagggccagtttactttcagtccccatattggggagactgaaaacttgagtttagtaaaatgccagcaaatcgtgactgtgaatatgcacatctacttagaatgcatagatcatttttgtttagaaaggcaaatcaaatttcggatttctggcttttagtctcctgaatcttcttatttcttctttttaattttgcccctagttaaggaactacttctattttggtcaaagagtaagctatatttccacaaaatgttgacaaacttcatagtaggagttattacgttaaaacttttatattcagaactccaaaacagacagagttttacttgtacaggaacatggtgaaacttaaattgccaagttagctttgcatgcatcttccttgtatttttgaatatcatatacaacacctcttctctccaacgttagtattgagtagcggccgggtacggtggctcacataatcccagcactttgggaggccaaggcgggcggatcatgaggtcaggagatcgagaccatcttggctaacacggtgaaaccccgtctctactaaaaatacaaaaaaattagacgggcgtggcggcgcgtgccggtaattccagctactcagaagtctcaggcaggagaaccacttgaaccggggaggcgcagcttgcagtgagccgagatcgcgccactgcactccagcctgggcgacagggcaagagcctgtctcaaaaaaaaaaaaaaagaaaaaaaaattgagtagcttagcgcagattgcagaaacatttttaggacaaactatgtggctttagctcttttcctacacaaactgccttaatatgaaactttttacctgggaaggtcttgaacctgaaaacaggcaaatataaagaaacatggtgaaatacaaagaaacaagttagtcttccctaatgatcagaatgtaacaaaggaggtacatttttcttgatagacaaaggaacacttgtaactacttaaacccgatatttgacattttagaatgtatctatgttaacaggaaaaaaagcaatgcttctgcttgaaatatttagattgttcagataaaatttgttttttaaaatttttgtcttcatttttcttgtgttaaaatatatttatgttattataattttgaactttattctgtagataatgcctctagtagttttttctaaggctagagatatataattatttttaactataagtattcagagagtacacttaaactgtgatctctcttacctctgtcttgtgaataactgtatataccacaatactagcaatattttgaatgattatcttttcagttgtattggtttgcatcttagtttcatcagtaagacaagtagatataaatgttactgattgctctgtacctattaacataatttaaataaggaaaaatgagaccttttagtaacagtggtcaatgtcagtcatttatatcaatacagtaatctatgcgtatataagcataaccagcatcaagtgctatgagtatatatattgcaaattcccagcaatctttctgtagcatattcactgggtaaattatgtgcttaacttttaaattatttactgaaatcaagattctgttggaatgatgttacatattcactgattccaagtcaacaacttgttctggtctttctgaaatagctcctaggttgttagctggccagaaatccctggatttaagttttgcttttcccatctgtccttctaatcagtcagctttctctgccaatgaatgttttcctagttgatttcccttagttctgacattgtgttataagctgaggatttgacatggcaaaagattcctaaaatgaggttcaggcttcttacaaaatagagaataaaactgagatagctaaggaaatttgcaactgaaaaacgtatatttcctcttgcctttaaagcatctgtactgaattaagtgaggtctggatgttacgggaatggcatctagatttcagatgttatattgtgttcattactatttgtgtagcattaaatattttagctcttttagattctgcatcctaaagaaaacaactttactgtctatcttcagatttttatgttgtggaaattaaataattatgacaatactggctatataaatgtcacagatctcaatattggaaaacaagtatagcaaaatgaagaataaatattatttcattaagcaaatctgtatagtagaataaaatatgatatgatataaacaaaaaaagtttaatatatttaacatcctaaaataattttctgttttacttttttattataaaacttaaaattacatatgtgacccactttcatgtctcatattgtatttgttttggagagctcagctctagaatgttgcaggagattgacataatggctgtgaagatttttctattgaccttcaattccttgtacttacttgcactatatatatatatatatagatatatttttatttttctttttggcaaatcacactcattgtatgttaaacttaggttagttaacctgtatgataatattaaaaacaacttgatttaatctgagattattatataaatatcctacttgagatgcagatacatttttgctatatttctttgaatatggctgacataccttaagttacaggacagtgttcttcatgcaaagttttatgtcaaccaccaggaccagaagtccaaatacttctgttcaattcatcttgatattagagtcaccaaggtaaatacaacacagtcaatcctgggatggaagagtgcttttactcacatacacaaaacagagcaagaaaagtttctgttgcatgcataggtctcctatggttggtgccccccacaactcaaagcaactaccatacatgcacccctctaaaaccacagtacaaagacctcgactcatgctgcatggaatctgaaatgctgaagttgagggtgtgtctaacaaccatcgacacacatgtgcaggctctttatctgttggtgaggaagtgttccaggcccatggtctctccctatatgtctgggtaacattcaaaagactgtgtacataagactactcttccctatatgttttattttcatctctcatttcttggaactagaaaggtgaaaggaaacattttacattctgctttgtggctatagatattgtaaaaaaaaaaatctgttcttttttataagatagttttttaaatgttttaatggtgaaattatttagaattatactggtttgatactattttaataaatttgttaaggtgtaaagttgcctatattacacacacacacacacacacacacacacacacacacacacatttcagcaagaatttgttttgagcaatctaaaatcaaatacaacacatgaaatcagagttgtgggtatgaatgacaaaagacaagaagataaaagtaaaccaaaatcttctgaatgtaaccattgtaagtagtcatgtcatgtttttctaatgcaaaattcaaaaaaatattcccatgctttacacttgctgttctcttacaattttttaaatgagattttaaaaggcaggtgtccagtgtttttggtaagtgacttttatctatcctgaagtggtttcagatgagtaaaatatctcagacaacaagaaataattttgctcttgactaacaaaaaaagatgtattagaatactcagagaaaatttttttcaagaaaattgtttttataaaaaaggtgtactacttgttcctattctgattaactggattgtagcactgagacttcattctgtgtgacagtggaaatatgcctaggtaacatgctcagtaatctattacttggatttcttatgactattgcttttgttcagtaaattacatagccaataagtatgagaaaatggaactaaaaaattaattcattaaaatagtagttaaaagggaataatatctattgtagctttaaacttttagcattttttctttgagatattgtccagcaaatagaatgtatctgagaacgttaaaatgtaacactttagaaattaatatttctttgaatagaaagtaataaaaaacaaaaaagaacatttcctttaatagaatatgttatgctattattcaaatacattaacatgtcctttgtagaatatgttatgaaaatatagaaaagatgtaatgaatacaagtgtatagaagccattatataatttattaatatttattcctattatatataattttgttcttgactacatagggaaaagacagaattactcaacttacttctttgagcttcccagcatgaaccctttaattttgtccaccttcagtcaggacctccctgcctcaccctaccagctccaaattcagcctgtgcctccaatctggacactccgcatttcttgctccagacctcagaccaagacaatcacccatagattcctatgcactgttctgatatgggaaatctaactgtgtaccatatctgtgtgtagactatgtggcagtggtatatagaaactatggactgttttagcatctgagtacataatctatgcaaaacctatatatccttaaaaatataatctaatagaccttctttgtcatttccacccaaaaataatcatttactgtggtctgtaattttttatgaacttctaacatttactactctttaagaaacctgacggaatcaatactgctgactagtaaactagacactgcaggggaatcataacaacagagatgcctgcttccatggagattttattccagtgggggagatagataataaataagaaaatgaattattacaacacaatttaacagtacattagacactgcattgtttataaattgcagtgactcaggtaggactaccagtaaattacaccttagaatgaaatactttaataaaccaagcagattgccttatccttaaccctaaaaagggaatagtgatgctgagaatataaagatatcaactgagcttgaggaagagagaatagtattcttggaacttaaggagcattaactagaataggctgccacagcagtaagagagctttagatagccacagaacacgtttcaagagccaaaaagtattttggccttttgatatcatgagggatgaaaaagccaacatattgcaaagttgtctaggaagtggctgaatgaactttgccactttactttgagctggcagcaacaccaagttgtcactgaaaatgacttctcttaaattagaattactactgcatattgtttactgaaaaattctgttaaaaacaaaacatactttatagagaattcatgtaatattcacttttttatattcataagcatctctataacagtgtcagttttatatttataatagttggattttaaaaattctgctcaaggtcaatttttaagtaagggaacttttaaataattacaactgaattatctgtagaattgtcttccataattttctaaaattctattttaagacttccaaattcaaatattaactttaaaagataaaaaaattgattttgaataaatatttgatttcagtgattatatttgtcatcagctcctcctttcaattaatatctcttagagaagctatcattatctcagttttcacattgataatgatgagtagctggatgcagttgtttggagacttcgagacacttctgaaaggccttagaagttttcatttaatctgacagcttcatgttcctcaagctggtttttttggaaattctgaatagcccatctggaatttctataggaaagaaaatcttgataagaaacagagtactgaactgtgtttagaatttatttgtaaaagatagtgaacaaattccatgaatagttctctcaagcatttggcaggacacatttgcatatagaattattaatgtatacaatagttttaggtaataacacttttcaggaaatctgtaaaactttaatgcaggaaataatgtacacaaaaatatgatgaataatttttaaatcatttctaaactttacctaaaattcctgtatctataccaaaaagatatttttaactgtctttctaaggagttgggataataaattgaagtgaaataaatggtgtactcagttaaacaatcaatactgatatcagttattagtaaaacattgactttatttatcatcacaacttcttttcatttaccagtaaagttacccatgaaatttattaatagaatgtatatgttttagaaaatatttcactttttttgctctagtgtttctagttccaacattctagaggcagattttagtaactaacagaaatgtgaatattcataacataattcaaattttttaattggaagctttcttcatgtgtctgtcaggttttggtatcaggctgatgctggcttcatagaatgagttaggaagaaacttcttcttttagatttttctggaatggtttcagtgattgatatcagttcttctggtagaatttggctgtgaatctatcttgttctgggtctgctttagttggtaaattctttattactggttcaatttcagaaattgatattggcctattcaaggtttcaatttatgcaaggagcgaatcttttcctgattcaacttgagagattgtgtgctaggaagaatttatccatttcctctagattttctaatttgtgtgcatagagttgttaatagtactctgacgatcttttgtatttctgtaagatcagttgtaataccacctttgtcatttctgattgtgattaattgggtcttttctttctttttgtttgttaatatagcaaagggtctatcaatcttatttattttttcactaatcatcagatagatacaaattaagacgacaatgagatacaatctcacaccagacagatatggctattactaaaaagtccaaaacccacagaagctggtaaggctacagagcaaagggaacacttatatattgttggtgaaaatgtaatttagttcagccactgtgaaaagaaatctggaaaattttcgcagaatgtatagcaaaactgcagttccacccagctatcccattactggttatatacccaaaagaaaataaatcattctatcaaaaagacacatgctcttgcatgcttattgctgtgctaccacagcagtgaagacatggaatcaatccagatgcccatcaatagtagattggataaagaaaatgtggtatagatacaccatggaatactatactaccatataaaagaatgaaatcatgtcttttatggccaatggcaatatagatggagctggaagccataaccctaaacaaattaagacagaaacagaaaaccaaatactgcatgttatgacttctaagtgggagtcaaacattcagcattcatgtacagaattatgggaaaaatagacacaaccaacttagagggtggtggcgggggtggaattaaaaaattacctatcaggtactatggtcacagcttaggtgacagaatttttaccccaaacttcagcatcatacaaaatttccatgtaacatacctgcagatgttatgttaaataaataaaagttgaaaaaaaaaaaaaaagcaaaatgtgctcagaggtcttacaaagctgacttccagtctcgtcttattagtaggagatgtgtcacacacacctcccctaaatggaatgtactcagagaaaaagagattgtggaaataaattagatcagtgagttaatggtgtctgccatttcctaattatttatattagcttaaagtttctctgaacatttgggttatgccaaactgaacagccaattagctagttgtttagcattcctgagtctcacccattctattctggtagaggctttttgtcattgtgagaacaaaaatgcctttgtgcattttcaaataattcaaaacgtgatgtcatccaccttgaaagtcacttaatttcatatgcagtcatgcagcacttaatgctgggagatactttctgagaaatacactcctgggtcattttgccattgcttgagcatcatagagtgtactttacacagaatagaatggtacagtctactacacacctaggctatgaggtatagactattgatcctaggctacaaacctgtacagcatgttactgcactgaatattgtaggcaactgtaatacaacagtaaatatttatgtatctaaacatagttaaatatagtactgtaaaaacatagtataacagatacaaaaatattattattatatgtagagcatttaccatgaatcgaggtagcagaactggaaattgctctgggtgagtcggtgtgtgaggggtgagtgaatgaaaagccctaggatactactgtgcatggctattggctttataaacactgtgcacttaggctacactacatttataaaaacctttctttaataataaattaaccttactatagcttttttactttataacttttcatttttttaacttttaaattttttgtaataacagcttaaaacacaaacacatgatatggctgtatacaatttttcccctatatccttactctataagcttcttcctatttttacatttttttattttctactttttaaacttttaaattaaaatttaaagcagaaacagacattagcctaggcctacacggtggcagcatcatcaaatgtcactgtttctcatctccacattttgtcccactggaaggtcttcaggggcaataacatgtctgcagccatcattccctatgataacagtgccttcttctgcaatacctcctgtaaaacctacttaaggctgctttacgttaactctttaaatctgagtagaaggagtacactctaaaataacaataaaattatagtaaataaatacataaaccaataacgtagttctttattatcagtatcaagtagtatgtactgtacataattgtatgtgcaatatttttatacaactggaagcacagtatgttggtttatacgggcatcagcacaaatgtgaataatgaattgtgctatgactttacaatggttaagatgtatctgggcaataggcatttttagcttcattataatcttaccggaccaccttcatatatgtggtacctcaatgatgaaaatattgttattcagagcatggctgtattttcagatccaaaaagtagttattatagtatctcctttctgtaaagtggtctagaattatttaatacctggatttaaaaagaacataaaataatgaggcacataattgaggtaatcagcaaaataaagctagtgagacttaagttaatataaagttgatcactaagttttaccttagttttaacaaaaagaatatatcttgaaacataaactaagccttaattaaaattttggtgtagaccatggttatcttaaatgcactttttctccaactgcaattcttctcttcttcccacaactaaacatcagtagtgacatgttgccttctatttactcagtaatgagtattactagcactcttagttctttccaaattcctcctttcttttctctccttttcactcatcctcaattttctctttctttattcaccatccactaacagtttttaggaaatttcctctcagtaatgttgcagaatgatttgttttcttactttgtagtggatattattgactgaaaagcagccaatctgttacttttctctgggctactagcatttcaacagggaagcctacatatccacaggaataaaagtgtagttggacgattttaggcattagaagcaagtatagcctgtgcataaaattacctcactacattctgggtgttaagggtgtgcaaggaaagaaaatactgctagctcttggagaattgtttttaacaacaaaaaaggaaggaacattttctctaattgtcaggggtctcagaaaacatgactttagtctaagcactgttcttctgtgacaataattgaataggaattgctgtctggatattagatccacttctaaactatcccccagtttgccccactccctagctacctctttccagataaatacagccatccctgttctctttctttcccatgatatctgatattcttccctccgcctcaaatcattgaaatgttctccagaactcttcttactccttatatttttcttctctgcttgttccccaatttctttttttatctgaagacaatttcccaaaatgtcaatgacttagcacttggatatccaggtcacttttttatttatttctgacaacctactctactaactcttcccagcctgtctcttagtaggaccaattatagatgtccatgattcaataacaagatatattaatgaggctgcatggtattctcaaaccagagtagaatatatcttatcacatttctttctaaagagattatgtcttcaccttttccaattccaatagagcttgttaattaaataattatgatagcattatccattaatcctttaacatgaaggataaaaacaaagtaacaaaacaggttcttgaccatttgttatctgctctgtaatcccacatcatttcatatttttactttcagctctgtgagtttatacattttaaatatttgaatacatattttagggggatcagatgacagtaaaaggctttatagtttttacttcgttgtaatttttaagttctatccttcctcattcacaaagtatgtgtattcctactatagtggaataggaagataatactgagataatatatttcccatgctggcattatttcctggcagaactaacaataatagttcagacatgggtattattgagaaatagctggaaactaatataagccatactttaagagaaaaaaagattatgttatacgatagacctgaaagtatattttacaaccctattttctagatgtggaagatgaatctacttgctcacacattcagaaaacgacacttatgagattgcatagaaatttaatgtctctacagaaccttggtgggaattgaggtaacacaaatcaatagaattaaacatctatatggagaataggaaagtaaaaatgagtgtaataatgtcacattatgcatgagaaaatgcatacaattatcttaagtagaaattatttcacaaatagtttgtatttattgtgtaaaaatagccacatatattttaataaacagttttggacacggtttctttcctatgtttaggaaaccatttaatttgctgatagctatggtattatatgagtcttggcacattaagtaagttttctgagctaaagagaactaacgaaaattggtagtttaaaatcaattaggaagaaaatatgataggaactagcaattgtgcttgtggcatagtttctaaagcttaattgaccttcgtaaggtactcgtagtaagtaggttgtatcatatcacactggtaataagagaaggaaaatagcttaaaataaggttttaaaataataaaattaggtgtaatttttgtgataaattatattctagttacttatgtctacatatatacttttaattgcccttcactttattgcactttgcagatattacatttcttactaattgaagtttatgtcaaccctgcattgaacaaatctgttgacatcatttttccaacagcatgtgcttatattgtgtctatgtcacattttggtaattctcacagtgtttaacacttttattactattataatgtctgtatggtgatatataatcagtgacttttgatgttactattgtaattgttagagcaccatgacctacacctatgcatgatggcaaacataatcaataaatgtcatgtgtgttctggccatttccttgtctcttgccctctcctctcctcaggcctccttattcctgaagtcacaacaatattaaaattagaccaattaataaccctaaaatggccttgaagtgtccaagtgaatgtgtcacacatcagtcactttaaatcaaaagctagaaatgattaagcttagtgaggaagtcatgtgaaaagcagggattaactcaaagttaggcgccttgtgacaaacaggtagtcaatttgtaaatgcaaaggaaaagttcttgaaggaaatgaaaagtactattccaatgaacatgtgaatgataagtgaaacagccctagtgttgctatagagaaagtttgagtagtctgaataaaagatcaacctagccacaacattctcttaagccaaagcctaatccagaccaagaccccaattctctttaattctttgaaggctgagggaagagaggaagctacaaaagaaaatttggaaactagaaaagggtggttcatgaggtttaatgaaagaagacctctccataacataaaagtacaaggtgaagtagcaagtggtgatgtagaatctgtagcaaattatccagaagatctagctgtgatcactgatgaatgtggctacactaaattgcagttttcaaatatacatgaaacagcctttgggaaaagatgcaatctagggttttcatagctagagaggagaagtcaatgccaagcttcaaatctccaaatagcaggatgactctttcattaggggttaatgaatctgttgactttaagttgaagccactgttcatttacctttctgaaaattcaaagacccttaataatgacactaaatttcctctccctgtagtccataaatgaaacaacaaagactggataaaagcatatctatttacagtttgatttactgaatacctgaagcccactgttgagacatattgctcagaatcaaagaattctttcaaaatatcattgttcactgacaacgtacctggtcatcaagagctctgatggagatttacaaaaagattcatattatttttatgcctgtgaacacaacagcaattctgtgtcccatgtatcaaggagtaatgtggactttcaagtcttatttatttaagaaatacatttcataaggcttccataaatgctgatttctctaatggatttgggcaaagtaatttgaaaactttctggaaaagattcactattccagatgccataaagcatatttgctatgcataggaggaagtaaaaatataaacattgatataagtgtggaaaaagttgacttcaactctcatgtatgactttgtggtgttaaagactttagtggaggaagtaactgcagagttacttcctatctctgagttactatcatgagattactgcaatctcatgataaatcttgaattgttgaggagttatcttttatgaatgaacaaagaaagtggattattcagatagaatctacttctggtgaagatgctgtgaacattgttgaaatgacaacaaaggatttagaatattacataaagttagtttgtatagctgcagcagggttgaagagaattgattccaattctgacaaaagttttcatataggtaggtagaacttctaccaaacattgttgcatgctacaaaaaatattttataaaaggaagtcaactgatgcagtgaacttcattgttgttttatcttaaaaaattgctcagcctggatgacatagtgagatctagtctcaggcaaaatttttactttttaaaagttaactgggcatattggcatgcacctgttgtcccagctacttgggaggctgaggtgggaggatcccttgagctcaggagttcgaggctgcggtgagctatatgattgtgccactgcccttcagcctgattgacaagatgtgactctgtctctaaaaaaaataatgataataaactataaaaatcatagaatataacctagaatatattcttctcaacattggccttggcaaacattttgtcttaagtctccaaaagcaattgcaacagaaacaaaaatagacaagtgggacctaagtaaactaaagagcttctgcacaacaagagaaactatcaacagagtaagcagacaacttacagaatggaagaagatatttgcaaactatgcatttgataaaggcctaatattcagaatctatagggaacttaaacaaatcagcaggcaaaaagtaagtaactccacgaaaaatggacaaaggacttgaacagacacttctcaaaagaagacatacaagtggccaacaatcacgaaaaaatggtcagcatcactaatcatcagagaaatgcaaatcaaaaccacaatgagatatcatctcacaccagtcagaatagctatttttaaaaactcatgaagtggccgggcgtggtggctcatgcctgtaattccagcactttgggaggctgaggtgggtggataatgaggtcaggagatcgagaccaccctggctaacacggtgaaatcccgtctttactaaaaatacaaaaaattagctgggcgtggtggcaggcgcctgtagtcccagctacttgggaggctgaggcaggagaatggtgtaaacccgggaggcggagcttgcagtgagccgatttcacgccactgcactccaacccgggcgacagagccagactctatctcaaaaaaaaaaaacaaaaacaaaaacaaaaaaaaactcataaagcaacatgctggtgaggctgcagggcaaagactgcacattgtttgtgggaatgtagaaagcagtcttaagattgttcaaataacctaaaacagagctatgattcaacctagcaatcctattactatttacccaaagaaaaataaatcattctaccaaaaagacatgcattcatatgatcattaatacattattcacaatggaaaagacatgaaattaactcaggagcccaccaattgtagactggataaagaaaatgtggtacatatacaccctggaacactacatggccctaaaaaagaatgaaactctgttctttgcagcaacatggatgcagccagggaccataattctaagaaaagtaacacagaagcagaaaaccaaatactgcatgtactcacttgtaagtaggagctaacactgagcacacatggacacaaacatgggaacaatagacactgcggactactagagtggggagggaaggaggagggcgtggattcaaagactgcctattgggtactatgctccctacctaggtaatgggatctgtacacagacctcagcatcacacaacatttctatgttacaaagctgcacatgtagcctctgtatctaaaataaaagttgaaataaaaaaaaaacatagtcatcttaaccctcagcaacaaccaccaccctgatcagtcagcagttatcatcaagacgagagcctccaacaacaaaaagataactcactgaagcttcagataaccattagcatgttttagcaataaattatttttaacgaacatgtctacatttttagagatcatgctattatacacttaataggctacagtatagtgtagatataacttttatatgcaccgggtaaccaaaatatcatgcgactcatctcattgtggtgtttagaaaccaaattagcagtatctctgaggaagcctgtatatggaaatgtacctgatgacatcaccttaggctttaacatatattcaagtaagaaataatttaaacgatacatattgcaaagcatttcaataattcttgtttatttcgatggaagatgagattttgtacatttttgtataaagagcagaaggactaacacatagtagatctttgatcaatatttgttaaactaatgaataaatgtatacacagctaaattgtgactgttacaaaattgggtaatttgtatatataaaaacattagtaagtttaatagttaatgtattaaaatatatctccttaatattctgtgtcagagtgggaaaacaccaacgtgaattcagggagaaaaaaagatgattatttttctgaaagcaggttttctcaaccttgggacttttgaaactttggaggtggataatgttttgttgtgcagagatacacacatatcataggatgctttgcagcatccctgccttctgcccactagatgctaatagcaccatctttcaaactgtgacaatggaaactgtcttcagatattgtcttcaatatttccagacggggtaattttgcccctgtttaaaaaaaaaaaaacaaaaaaaaaccacgtttctaaaaaatcatgtggatgagaaaggccaggagtagctgaagtaggggtgaatccagtatttaaacttaagtttaaatcaatctattttgacatgaatcaagaatcatttgaatatattatgataatgtaaaaaaatttgaatctgaaaccatactaggaacattcaaattctacatttctaaatttcagaggtagataaaaggtatcttaatgtttttcatatttcaataattatcaagataataatgataattttatgaataattactgcaaagatcagctcattcagactaacaaagtgagtttcagaaaaactagggccttctcctaaccccacagattctattgctatttaagcagattctactgcttaaatcatcccatggcgccctcaggttctcataggactttttgttcttattcattttctctcttctctgctgcttttaaaactccacagaaagatgttacaggtattttgttcactattctgttttgttgttgtttttgttgttgttgttcctagtctaggcccatctcccaacaagagttgagtaaatgtttgataagtgaatgaatagattaataactttgcaagaaatgcaagtggtttattagggaaaaattaattgtatttggggtagctgtcattcactgaatacttagctcacctggttttatttcttaattcagtacttatttaatatactgaacagtcatcacgtctctgacttcaagtcttctcagtttttccatgaatttctctgtaaatctcatggtacactaaatggtacttgatcaatatgcctaacatagacatctaattttacattcaaagagcatggtgaatgtcccatatttattatataattacaaatagtttttaaaaaccacaccttcagcaggagtgcaactatcttctgcttggataaaaatacagacgtttcaaactttttaaagttctatttatgtaatttgttaaaaaatctttctgttacagaaacataactgagaaggaacagataatattatggcattcaaaccatgatatctatttgcttcttcctgcctgtgctaaattactagctgagagaaacttcatgtttgggctatcatctatgcaaactgaaggaataaatatgttctgcaaattgattttagagaatagaccctcagctgctgccaaaatctagacattattgttattaattatagtcaagttaaggttgcataattacagcgcagaataaattaataccaagctaagctgcaggaaagaaagcaaaaacagtatgttttataatttttaaaaaagtatatatacttttgtctctggtgaaataaaataggtggactctcagtaatggatcattatggagacatgccagagataacagtcttacgttcatacatttgctacgacagtagttaccttataaccacacctaccatatattacctggtaaatgtggatacacattaactacattagcagattgaatatttacaaagtcaagagtagcaggacctatcatatttctaattttagagatgagagaaatgagacagaaagattaccaaatttacctaaatttacacaattagccaaagtaactttgactcagttaaaaaataatccataacataattcactctttaattaactgattaggggatcaatgtttatttgggggaggataaccagaaaagtatattttatgtgatttagtccaagacattactgtataaaacaaatagggttaaagcatagaatgccataatgccaaattaaaagaattaataacagttattgagtttcacttttatgctgttacaagagttgagtgaaaattagtgcagaataaaatatagaattaatgtcttaaattcattttaattatataatgacaataaaatagaatttgaaatttaaatatataaataatgttgtttgtctttacaagtcagtttttcttattttttctcaagaaactttcataaaaaccattttagaatgattacattgatatattagactttcactatatacatgctttaaattttcctcttgtgtaatatttaagatattactgatcaacgaagtgggtaaaacaggtagataatggcggacataaaaaaatacagaagtattatgtgaacctctgcattatcaaaaatgaattatgaaactattaatttcatcagactttttaaggagatgtatctccaaataatatcaacccttttctcatccagaactatgaatttattcttggatacatattagcaaaataataattcacaatgttttttaaatttatgagtgccttttcaacatatgatggaagtgaatgtccgaaactcatattctgttgaaatgtgtcacgtaactgttgatcaatgtctgtgaaaaatctgtttatacatatatttctaatcttatgtgaaaatgtcagagacaagtatgtgtcagaattaaatttttaacactaaccttgaatctaaagaaattggtactctagaaattcagttgacttactagaataaatattttatcagtaaagcaataataaatttcaatgcaaacacaatatagaacacaaattctgaaatatgccacagagtgttttaaataaagaaggcttgcaaaagtgtaaaagacaatctgatcctatgtctttcagttctattcttagtaaatgatgctgcacatctattcatcctgtgaaagtcaaagaaataggactataaaaaaaattcacctccctgtctttcaatgagatattttttctgcgtattgttataggatttttcacattatacctttgtcttcactgacaagaaatgtgactgagggtcatcaattgcgttttgcagttctatgcattgggtctcattttccattttttttctttatccttcacagtcacagtttctacaaaattgcactagtcaattcaatgaaacctgcaaagcagatgaatatgtacctggatttagatttctaaattaaattgatgttcacattacttcaaatcaaggccattagtaggaagaactcctggatatatctgcttctaataaaactgcagaggatctaaaaaactaaattatactcagcccaaagacttttcacttttattttatgtcaaaatatatagcatcattttccacaactagcattcattgcagaacacccctaatttccaggtttgtcaatctcaatcaatggctgagtatttcaatacccgatgaaaacaattaatatcaaaatggtccatatggctacattccagggcttgaaataatgatttaggttaatactaaagttttaacacatatactaaaaatgtaatgtacatttttaaagtatttcaaaattatacaatttagcagattaaggttgaaattgtcaaatgaatgtagttagattcataagcctcttgcaggaatctgtgataatttccccttttttaaaataactgatattgttcatatatttgtgtttagaaaccagtagataacatttctttgagggtatctggttggcacagctgtattataaaactgagaaatgaattattaacaatttaatttgcaattatgtgaaagaaaacattccacaaaaataataaaaatattaatattttaaaacttttgtatgagcataaatagtgacatgttactgttgcaaaagtgaagcatccaaggattatgtaaaaagcatttataggttacaaacttaagatttttttagtaaaaagtgaattaagcaataattaagctattatcacaataatagcctacctaaactataaattctctacatttttatatcattgtttactcaccaatttctaatgtcatgtttccaaatgatttggacttaggggtggaggaaattaagcactatagaataaatattctataacacacggaagtctctatcatggtagatatatccccattcactccatttccagcaatggaacttactatctttcttttggaatatctaattttcacatggtagagtttcaaattctggaatttattggcttaaccttaacagtttaaaatacagaacaaaactgtaaaaatatttccacatagcagggtacaattctccaaagttttgagcttataatcactaaaggattcaaaattatagatgtaaccctatttttgaagtagaaagaaacaggcacacagggtgatgaatcatcttcccgcaaaagacttctgcaatttaaactaatggtgaaatgtagacttgcaaaagctagtaagtttggtttcttgaaatcaacagatttgccaaaactgtgatttgctattaagagaataaggtccttacaaatttaaatattacaactggaaacaaccgtctaagaaatgcgaacgaaggaagtggtttctggatatgcacacctgtgtgcattaaatatcctgggcgatttaacttttcaaactgagacataattttcagaacaaatcgaatgaaacaaaactacaagtattataagactgtatgaggttcaatcaaattaaaaaatactctgtctttttattaatacagcgagtgacagaggcagacacttaatatttgcaagcttctagtacctgaattacaagaaataaactatgtattttaacatttttgttttgccctttaaccccagcttcagcactcttcactcatctatttctttcacctctctcacaattgtgaataatatctataataagcatgtgaagaatgggataaatagaagaataaaagtttactagagtctgtccaaaacaccgtaatataaacaaaaccagcaaaaccagagatccagaaaacatcttctgttccttgaatgaatgacaggggccggggagaagttccggtttactctgtactcagagtcagcaacagaaaagataccgggtctctcattcaaaaagcacgactcctgtacctatggaaagaggggtgggggagaaaactaaggtctaggagtgagaagggtcaaaactggtatatttgaaagatagcgggtctcccattcataaagcacaactcctgtgcctacagaaagtggggatggggaacaaatctaaggtctaggaatgaggagggtcagaactggtatatttgaagtcatttttaagaagtggcttaaaaatttggaaattacaatttggaaagagttgggcttatatcctaattccatgacttaatactagatttatgaatgtaagttatatttttttgtatttttttaatagagacggggtttcactatgttggtcaggctggtcttgcactccttacctcgtgattctcccgcctcggtctcccaaattgctgggattacaggcatgagccactgcccccggcctgttataaatttttttataattttttaattaacatatttataaggtatgaggtgatttttgatgcatgtatacactctataaatatcgaatcagggtatttcgtgtatccatctctatacatttatcatttctttgtgtagagatcattcaaaatcatcttctagctattttgaaatatacaaaacaatattgttacccatagtcaactattgtgcaataaaacaccagaacggatcccttctatataactgtaattttgtacacatttaccaatctctcctatccctcctttctccttatcctcttcagtctctggtaaccacttttctactctacttttgtgaaataaactttttcagattccacatatgagtgagatcatgctgtacctggcttatttcatttaacataatgtcctccaggttaatccatgtcattgcaaatgacttgatttcattcatttttatggctaatagtatttaattattttaaacatacacagaaatgacaacacaatctaagaactgatggaatgcacgcagtcacagtccacaactattatatctgagtcacttgagcttcctaggtaattttatttcttaagaatagccctaatggtatgggttaaattgactttatcaaagttgacgtttaaaataatagcaagaggtgattgtaatttgagaaacgataattaactacagcataccaaatcttgggcagttttaaaatacctgggcctgaaatgcaaaaagttgttttgacttattggtcatttccaggatattatttttatatatgttatgtataactaactacccaagatttaaacatctataagttaaatccatacaattgaggatgataggggacttaaagaattagtattaccaataactgtgagtatcctaaatagcttacttaggtgatgctacaaagctcaggcttacaacttaatccccaggaaagctgcttttgcgctgatgagctccactgattccctcatgtccccctgtgtgtgactggtgctctagtgtgtcaactgagggacacaagtcatctgagcatcttgttaaaatgtgagtactgtatcagtagttctgggccctgagattctgcatttccaataagctgctagcggattctgattctgaaagtccccagaccacatttggtgagatttaaaaagtttttgagagaaacacagaccaacatggattctggttattttattttgattatactttaagtctctggatatttgtaaaggacaattattaaccatgtatcagctgccacacaatataggccaatacttatgttttgtgtttaataatcaaccaaaccactgtagctaggtattgtgaatttaagatgtacttatttatttattttattgtgagtttgttgtctttatcgtatttatttagtaagtaaagtttcaaagttctccaaagaaaagggaaaaaatagttgatgctcaaatttaggtatgtctgattgcacatttgttatggttagcttctaaatatgctgtactcagatatataaatcagataactttgaaaaagttatacacttaggctagcctctggatttctacagcttctccatgtagctataagacagggatttgaaactgtagagggtcatgtaactgagctcttagctgataatcgaaatcactatcccttttcgattgtctttattgtgtacgttgttgtccacagtttctggccgaggccagctggccactacttaacacatccatgctctcctgccttcagcagttgaattgtgcagtcaccaagagacagttgtgaagattccaaaacatatatattgtttgttcaaatattccctcaaatgacaaaatataaatacaaaaagaaaaaaaaagaaatggggtgtgtgtgtgtgtgtgtgtgtgtgtgtgtgtgtgttttcacctaggaaagccaagtagaaaatttagaaagattttatatggagatatatatatatatatatgtttatatttatatgtatatatgtttatatatacatataaataatttttgtactttttaccaaatatctactcttctaacataaggataagttgttttaaaaaatgttctcaagaacaggtaaggggcacaaactaaaattaaaccattaaaatcaacaagaatatgcacttaggtggttttctaagcatcttgacattctcactctacttttaaaaaagcaaaaacatttaactatctctaaaggatgtatttttgaaatacaatatggaacttggtgcttagtgaaaaacacttggtcctgcgtcaaaaaactggtgaaagtatataattttaataggccctaatttttttaagaaagtgttcattgaaataaattatcctttttataattatttttacattagatgaaactgatatttctgattaataatcaattatttattttaaccatattagataagtggttgtttaatgtattttaccaccattgtagacatttgttggtttagcgatttcgcgaaaatttcacattttccccaattttggctatatattctgagtgggccagaagtgaagcactcatttaagtgcttgtattatttaaaactgggtgcaagtgagagaaaaatcatactcaaaggcaaatgaatctgttctgtatgtttacttaactttatcacctttccccaaatcttccctagtggattaaagttcgaattaattgagtacaattcagtagattgttacctttgtaggggcggttgttttggtaaggcttctctaaataatatctctctcttcccatcaccattttgcttataagaacagtgtccctgtagttagatcccacattgacttgaagcacacatacagaactacaaactgtttaaaattataatacataagtaaaaccaaaacacacaagaaactgatgttaagaaacctacgctaaaataagcagtaatatggaactgcaaatcaataatgagagaaatatttactactaaaatctggtatgcaacattgatgtaccattagaaaagaaattgtctagataactgtaatattcaacagtaactgtgcactgatggaaggcacttttttttttacagtatcagttatgtttatattttgtttaccaattctgggttttcactcttgaataagatttctcttgattctataaagttctcacagcttcaagatcctcctccaaaaacattttttctttatatttaagtcttacacatatgtctatcataaataaattatgcatgcttgcacttttatctgtaaatatgtccccagttttggttatggctgatcttgtatatttcttttcttaacagatttgcaacggttgttttatccagtctaaatgagtagtcatagaaataaccttattttcatcatatttttatgatgaacacataatttctttgtgtaaaatacttttgtaacttaaaggtaatttttggaaagatttataattctgtttttcttttagttgttctttaaaaaaatcattgtgaaaacacataccataaattttaccatcttacatctatttaactgtacagattagggccaggcatggtgttggctcacatttgtaatcccaggatattgggagtccaagacaagagaattgcttgaaccgaggattttgagaccagcctgggaaacatatggagaccctgtctctacaagtttttttttcttttgagacagagtctcactctattgccaggctggagtgcaatgacatgatcttcgctcactgcaacctccacctcccgggtctaagcgattctcctgcctcagcctcccaagtagcggggactataggcgtgtgccaccatgcccaggtaatttttgcattttttgtagagacagggtttcaccatgttggctaggatggtcttgatctcttgacatggtgatctgcctgcctcagcctcccaaagtggtgggattacaggtgtcagccaccacacccagccaaaatttttttaaaatagccaggcatggtggtgtgcacatgtggtcccagctacttgggagactgagaaaaaagaatcacttgagcttgaaagtttgaggctgcagtgagctgtgattgtgccactgcattccagcctgggtgacaaagtgaaaccctgtctcaaaaacaattgtatatctcaggcatgttaagtatattcacattattatgcaaaagacctctagaaattttacatcttgtaaaactaaaactcaatacccttaagtgacaacagcccattttactctctcttcaacgcttgcaaacaccttcctcccactttctgtttctatgtgtgtgactacttaagacatctcacataagtagaattatattgtatccatcattttgttactggcttatttccattgacataatattctcaaagtttatcttaaaatgtgacaagacttcttttaagggtgaataatatttcattgtacgtacatgtcaaattttttgatgtgttcatcagtcaagaaacatctggattgtttcagccttttggcttttgtgaatattgctacaataaaaaggaggtcaaaaaaaaaaaaagactgatgaaccctaaaactaatcagcatttttctcactgatacacccagaaagaaattagaacatctgtgatgtcgatctgtgatttgaaaatagtacatgaaaatcaagcaaataaaaatgcatagatctatcagaattgttaatattatggttacttatgctataatcacctcaattgatgaagaacctaatcactaaggtcattcaattttcactttctaaaattgtactctaaacacaggacatatcctaaggatatgaaacaaaaataatacatcttttaataaactttaagccatttttctccaagtgtaaaaattaaatcaaaatcaaactattaatacttaattttgttttttccagaatattacatgtgatttaaaggccattgtacagctatttgctggctccgaaggaccctcaccagatatcaaatctgttggcaccttgatcttggacttcctggtctccagaactatgagaaatacatttctgttttttataaattactaattctaagggattttgttatagcagctcaaatggactaagacaattagtctaaaatctaagcatattttacttgactaaacactataaattttattgaaaaacattattgtaatttaactgtggatttgaacattttaaaataaaaataagcatgtttatgtttgatgttgaaattctctgtttctgaagtagcgaatgttttagaaagaaattcaagggggatattagcatatgatagtcttgtttacttccaattaacacaggaatacttttttctgacaaacactaaaaatagttaaaaattatgaatcgtttttaccaatgtgtatctttgtaaactaggagttaagacacaacacatgtttccccacttttctcttttatagtgtgacagtgtgattttgtactatgaatatttattatatgttaaagcctacttgctttttaaaaatggattatgatcttgatcttttactagattgtaagcatcatgttcattttattcactagcacaggcctggcatctgtcacagagcacggcacatgctagcaagctcaataagtacttcttacatgagcgattgtttagatttatgagtgaatgatgatgactctttttctctccctattccatcctcagcttccttcttccatatgtctttcactttacatgcttcctattctattgttttgaacaatgtcttgcttggtgtccttttttttctgtcactgatgtgtcttactccttttctctttcaggatatctttctatacccatctttgtgtttcttccttaaacttacattcctgttctctcctctgttaaaaatatgatatgaagtaaacatttttatctgttgtgttattaaatgagtttcgccctttgctgtttagagaataaggtaattgcaatatgtttataccttttttcctcttaaaaagataagaaatatgattcctattggagtttggtttttatttttattttctgtgggattttttgttttatgtgtgtttctggaagcctagatttttttaagtgctaagctacagaaatgtagaataatcttacccaatcaaccaaaaacaaatcccccaaaattaagttcatcaattaaatttgttttctaaactgttggtgctataaagataaaactttattctgcattatttctgtgtttgtttaaaattattattgagtttaacttaaatttagaaactttttgactaagaatgtttagagcacaatattatttacatatatataactgtaaattaagttcaaaaataaaattcttattcttacagtcttatctcactaatacaaccaaaataacattagttaacacaaagaacattaaaaaccaatataaatcaaattaaagacatttattttatgtataaaccatcatttaaataaaactatattaagtgtagcatttcatttcatttttaattatttattctttttgtttggagtaaaatgccttatatctgtatatgtatatatgcataaatatatacaaatattgaaactataaatattatttgatatttttatattttaaaattactgctcttttaaacaatgcacttattttaaccactaatactactactacatttagctaaatccccgtaaaataaaattgtatatgtgaattattttaatacacacacatgcaaatgttttctacttagtattactataaaattgtttaacttggtaataaaaccacacgctggtatacttcgctgaaatgttggtattttatagattatgatgttaaatgtttttcttatattttgtttataacttacctaccttactttgaacaatctcgcctgtcaaaatgctaccttttttctatatgtgaactttcatttacactattttttatggtatattagaattttcttgaaacataaaatgcaatgaattcaagattcaggtgttcatatttggttgtaaagagttcatcttgctgatccaaaatatgctgtgatgtatttatttttattatgataaaatttaaaacacacacataaatatttgaaagagctactcagtcatggacacctgagtcatctgagaaattttattatagatacctacataatttagataacttaatatagccttaccaagtcagtatttatcatgttcactttacagttatagaaattaaggctttaaataaattgacaatattatatacatataatcagcaatgcaagttgcaaattcaattctgtctgattcaaaatctatgtcatcttaatatgatttacttactcctgttatctgttatgtatccaataactctgtctttttttaatgtgtacataattatgcctcattattattataaagaaaccacctgaaatttggaaagattatcttcaaagataaaatatagcatccaaaaatgggcccacacaaatatagtcaactgatttttgacaaagtatagtggtaattcagaggacagataccttttcaacaaatggtgatggaacaatgggatgtccttatgcaaaataaagatactagatgcaaatcttacacttcacacaaaaaatgaataaattttatatcctgaggtatatctacatctctcgttatctcatattcagtctcactctcattcttgctctcactctctctctctctctctctctgggcacccaataacctatcaattgtaggatactaatgcttgaccaagttgcctcaaattgagacaaatttgaggggtcattccagtctcacaggatcagtggaaacttgtatattaactccctcccagtccaaagtctcctcctctctgcctccaccaggattttatagatgttattcccaggagcactcttaagtagacatccatcactcaaaaccatctcaaaatttgcttctcaggaaacacgatctaggagaaactggaaaaaagaccaaaaaataataataaaataagaataggtccttgaaatttatgctatcttacagttaggccataaacagtaaaacggtaaagtgggagagaaggagaacagtcttcaatggggaagaaaatgatttcttatcaagaacatgtgataattaatttcttcatattggattttctaagctaattgctgtcctaattcctttagtttccaagggatccaacaggttgttctttgtgttattcactttcaattaatctgcagtgacttaatcctctcaacccattatttaaagctaaattagcagtgttgtaacatgtgctaagatgttgaattgagcaggatatagtagagatagaaaagatagtgttgagatagaagataattatgaatgattgtgattcttcacctgagtttatttattatcagtataatcaatacatcatctggtttttcaatgagtaataattaaatatataatcctcttttttactttaaattgagctattataatatttttcttctcaacaaatggtgatggaacaatgtgatgtccttatgcaaattaaagaagctagacacaagtcttacacttcacacaaaatataaataaactttatatcctgaggtttatatctgcatctctcgttgtctcatgttcactctcactcccattcttgctctcactctctctctctgtgtctctctctgtgggcacccaataacctatcaattgtaacttaattcatttttttaccttaattcattttttttctggaacattaataatctgttaaacaaaagaccacattttgtaaatatcactgcatattttggcacaaaataatgtaggtggttttccccaaaaatcccccctctcttttctatcctggagttttaaaatagtctctgggtaaattttatgttgcaaaagttcagtataatttcaattttatttcaccctttcctcaaggttacaaaatccgtttcttttaagttaagagacactgactcatattgaaattaattcttacatttgcttgcaggttttatatgaaatttactctaaatattattaagataattatctgaatcaaattacaatggatgtatgaaatatacatgacaaatgagcatagttcactgggtatttcagaaaaattgagaattccacaaaaatagaaggaggttattgcacctccttcttttaagtaaaagaaacctaattcatctaatagacagctgctggcttatcttggagtatgaaactgctatgagaaaatttgatttctttcaagggtagaccaagactcatgtcctgagtaggttcatggagtgagtggcacatgtcatgtgtgacaccattggtgtgattatataataagagcaaaaatgaaggtcagtggtcactccagtcacttatttttttttccttattttattttttctctttttactctcactgacatatagtgcaggcaacatttttgagttttcatgatagttaacggataaatggaggagaaaagcagagacagaacattacaaatattagtcccaaggattttcataaagtgttaatagtatatttctcagtgtgttactaggggaaatgaaaagtcatgttaaaacataggttgagtctttgttgtgattatcctcttagggtgaggagatgttgaattttctatctacattttagttaatcctggtttttgcacatagcaggtactctttctccagaaatattaacatttggcatttttcctatgattaaaaaaaatttctaaaaaatctcttataagaaattccaagggatagagtagcgaagttcaggtgtgtgtttgcatacatgtgtagtgtagacacatgttttcaaatgtatccatgaatttaagaagaaacagaatagatttcactttggtcgtgctttactctttagagtttctccaaattctacatttcacaaagggatattcaaaattcaatgcatggaaattttcacaaaattaaaagcaagttatcaaaaataatacctatgactatatatacatatatatgtatgtgtgtgtgtgtgtgtgtgtgtataaatatatttgttgccaaacaaattttattcttagataatacatgctgatttattcacaggtgtctacaactcagaaatccttcagaagctgtcatattcaatatgcaccttgtatactagtttcaatgccaatgtttctaatccagaaggaaaaaatcagccccacttaaagagcctcactctacaccatgttcactcacaacacacccacacacatggttaccttgtgtaaaacaagaaagtgttattctgttttcccccattttatataatatttaggataggtttgactgctacagttacaaatataccctgaatagaatctagcaaaaattaattctcactcattcaagtccagagctagttggtagctctccagagcaattttattcttgttgtgacccaggaatctaggccacttctattttgcagtaactttatctccacttgtggccgccataattgcagtggcagtggaacaatggcatagagaacatccacttgtttctaacagcctcctatcaaaagggatgcattccacttcctttctcagccaataagccatctagtcatgtggttccaatctttctttttggaaagcttggaagtcttcccaaatcccaacaaaagagaggagagcccaatacagtgagcatagccacagccaccacactatatattagctatgtgatcatgaacactcccataaacctttgcatattatagatttttcatcttaaatttaggacataaaactgatctcagaaagttactgtaaagattaaataggataacttacgtacctcaagtaacacatagtgtagaaaacaggatatgttagttctttctttttttaaaaaaagacccataataatctaatgatgagttatctcccttggctacctgtttaaatacatttactaaagattctcaggttccaatttcacttactactgtttttgcaagtctttcaaattagggagggaagatcattcagggacaatgagaaatgtaacatgaaatgcaacgagtctttcaggaatatgcattgacaaaagaatttttaactacccgctcataatacatttacttggaaaatgaacagtaggtgagtaaaaactctctctcccctcttagagtcccagctgggtctgagaattgaattgatctaagatagattaataggaaaaaagcatacaaattcaatataagttttacatgccacaggaggtcttatagggaaatgaaaactcaagcaattggcaaaacctacatgcttttgtattaggttgaacaaaaagaggcaattgtggaaaagtagctgaattatgtagagtctaatgggacataaaaataattaaacaacatctaatggtacatattctctcagctatgagagaatcaaagaatttttcttttctcctgatacagggaggacatcttttgtatgagagttttaatgtgttttcaagacagaaaagggaagattgcaatgacattctttcatccactgtttttcaattgcctttagatgaaagcaatctttatggtaaagtggcatgttttggggtgtatattctgtcatccttcataattaatataaatatgtatataaaattttaaaattaataagttggttccattctcttgtagaacacatattttctttttaattttattttgtgttaagaaattctatatgcctgaaatagctatcaaactagaaccatgcaatgttatcaggagtggagcagacaattatttggagtaaataaatcaaattaaacatgtataatgaatactaaaggaaatattagaaaagaaatgtttttacaactgaagggaaagttacagctattctcaggaacatttaaagtatgcattctcattttatagggtgtgggggctttccttattcaaaatattagacataacttgtttttgctttctggatcagaaaatattgagtgtgtttttatttaactgtctaaaagttgttttgaaataatatttaatgtaacagggatgcctgattaatgtctctcattgaattgatagttcaacaggttgcgtttgttttttaatatgaataggctaaaaaacaaaaacattatacaatatatattttaagtatatatatatttatactctctctatacatatgtatataccgcctctattttagacttttattttccaactgtcccatttttaccctaacccaactgttcccctctacatgtgctgcaaaagggttttcttccatagtttcattttcttttgttcccctttcactgtgaaatgtacttgccttactaatagtactcaaacagacataattggtttcagtcttggtttggacatatgtgtgacaagttccatatgttctacattgttagtaaataatttcaaccacttttttaaaaagttgtatttatttatttattttgagacggagtcttgctctgtcacccaggctggagtgcagtggtgtgatctcggctcactgcaacctccgcctcccaggttcaagtgattctcctgcctcagcctcctgagtagctgggattacaggcacacaccaccacgcccggctaatctttgtatttttagtagagacggggtttcaccatgttggtcaggctggtctcgaattcctgacctcgtgatccacccgcctcggcctcaagcatgaacacataaactgaggacgaggcaagataaagaataagcagtctaaagcagaaagatagcctttcaatgtactattgcgcctttagggaatggaagtcgtctgtaagcacagtgtatctgcagcagatagaaatctcctttgatcaatgttgcatcagcaaagaacattcctatgtaaaattgatacaaactttatttgagtgcaaacattgtgaaacctgtgttagagatcagcaggcatgctgacattgatcagaggagatttctcctgatctctaacacagatttcacaatgtttgcgctcaaataaagtttgcatcagttttacataggaatgatctttgctgaagcaatacatttcccaagctagaattggaaatctgaatttaatagcacctatcggatataattttaatatgatggatttttcgtttttagaacggaaagcttaattctccttatctgagttagatgtaaaaattatcatcctagatgacagtttagctattttgtttgtgggtgtttgcatatgtttcctgactcttttaagtcattttagactcctaattaggccaaattcttcttctgaatcactgagtataaaaaacagtctttaacaagattcacagacattccatatcctttgccaagctcactagtattgctatcatttttatgctccacttaggtaacattaggaagcacttttgtttaactcactatgaaaattaaagatgaaatgatgtgtaatttgaagttttcaatttttttggcaggtaagattttaagactgaaatagttgcttgaaatctatctttattgatagcaaatcaaggaagacatcaataattaaataatagagagaacattattttatttgaaaggggcattgacaacttccaatggaaaattttagctcaatattgtatggtatggtttgaatgtttaacctttctgaaattcctgttgaaacttaatctccaatgtggaaatattgagaggtaaggcctttaaggggtgattgagtcatgaggataaattgggccattcctggattaatagattattgggctgatgaattatttggttatctcaggagtggtacttgtgtctttataagaagaggaagagggaattgagttagcatgttcatctcacctccccacattattatgccttgtgccgcctccgggttctgcacagagtccccatcaggaagaaggccctcaccagatgtggcccctggacactggacttcccagcttcgagaattgtaagaaatttcgattttaaaaaacaaattaccctcttgggtgttcagttatagcaacagaaaatgaactaaaatattatgtttcaaatttgtgtggtataggtttccagaaaagaatttcttcattagcatttaatcaagacaatcctgggctttctctgtgttttcaggaagtgtcaaggtacattatttaaatgatgaataaggttataaagaaataacatagccttttcatagtcagataatgtcatatttaaaatggagcattaacctgtatgcccagtcattgtggggagaaacataatcctgtcaaatttcaataccattttaagactcttttcagagtgggaaatacaggtaaaacagttgagaaaaaatgcaacatttaaaccaaataatacaggaaatacatagaagtaataaatgctggtcaattcatggtatcaaactatatagaatttttaaattagtaaatagaaacataagaacttacagtgtgggtttcagactaaacccagctgtttaccacctctcctttccaaagtctcattctgtgtcagaaatcctgaagttcaataggatttatgtttggtatacattaaactacgttgtgttttacatctctcctctctttgttttctgttacgtcttcatagtttctggcctggtctactgtagtatctcccaatcactggctccttgcctcaaatccatttgtgttatgtctggccaccagagtgacctatctaaacattatatttcaccatgcattttcagtgttttaagcctttctctggctttccaccttttagaatatataaattcacaatacaaatatcacaatataaacattaatatgatgggacactccatattatcaatttcacaggattctcctctttcttagtcactgttcccttgtattccatgtttcaacaccccaatcacttgctatttcctgattaaatccagacaacatactgctttctccctcatgccttttatctttttttttttcacggattatccctctgttgcccaggcaggagtgcagtggcatgatgttggctcactgcaacctctgcctcccaggttaaagcaattctactgcctcagccttccaagtagctggaattacaggtgcctgccaccacgcctgactgatttttatgcttttagtagagatggggtttcaccatgttggccaggctggtctcgaactcctgatctcaagcgatccatccacctcagcctcccaaagtgctgggattacaggtctgagccgccaagcttagctccccatgcctttcttaatgctgtcctccactctgctgtgacattctacttccccatttgttaggtttttcacttgactcttcctttagtaatcaagtgttacctaattaacttagctcctcatgagtaatgttcttccaaccaggttaatttgcaccttctaaatacttctataaggtcctccatatttattattgcttactgcaattggcatttgccttaaaattatctttttgtgatctactttatgaccaggttgatagttccttgaggtcagcaacaatgctttaattatctcattcttaattatcacatgctgatgtcaatggaaatactaaacagatccttaataagctggatcctaacctctgacatctttaaagagatgtactgaaactttcaacatcactattcatttaaatggacactcttttttatcacaattacatatatgctcaaaatatagtttcctacatattaaatatataggaaataaatatttatatgtatatctattagaaacatttactgatatatttaacacagatgaagctaaatatgaaagattttcttctcccagcgtagcgcgttagtctgtttctttgagcagctgccccaggtgtcagcgttcaggaagtcatttaaaaccagggacaccagggtagtttccatggaagcagaaattaaccgttaacaatctcctacacggttcacatctggtataattcccattgtagagaaaaattgagtcaaattactattctaaaagacaagtagaagtaagaacagttgtcttagtagttattgtatattactgcaaatgttccttggtgatatgtatcgtacgttaatatagaaaagtaaagagccacaatctaatgacttttccaaaacatatttttaagtgactatatgataataacctttgctattttaggttgttaaatatctaccctatcaagtttgggcacagtggctcatgcctgtaatcccagcactttgggaggctgaggcgggcggatcacgaggtcaagagatcaagaccagcttggtcaacatggtgaaacactgtctctgctaaaaatacaaaaattagccaggcgtggtggctcacgcctgtaatccctgctacttgggagcctgaggcaggagaatcacttgcatctgtgaggtggaggttgcagtgagccgagatcgcgtcactgcactccagcctggtgacagagccagactccaactaaaaatatatatatatatataatatatatatatatatacacacataaaatatatatatgcacataaaaatatatatgcacattaaaatatatatatattatatatttaccctaccaaatatctccccaccctaagtttcctttgtccatagtttcagaaaagactttattgatttgaaaaaagaatgttcacttggcacagtgaaaatatttcttcattatttctcttaaaaagatcttgaagttttgagaggcaaagggttagagaagccctccagtggcattatcacatgcaggagttttagacttgaaaatagtgaaggaaaagatattcccccacctataatttgtcctcacttgactcgagttgtacagtgatccaaccctttttcaatctctatcacacaggtagtttatgttgctttggaatatttttaggggacaaggcaaatcgtgttttctcaaatgctttttggaactgactcattaaagagattcaattaaagaataaaaagacttaaaaaagaacattgtgctatgacatctaaattctatttgaggaaatatcagataaacataaaatgcagaacatttcattaaaatcaaaattaatgtattcttcaaaaaatgccaatgtcataaattacacagaaaagcttaggaattgttccgtattaaaggaaacttaaaagacgtgaccagtaaatataatgtgttatcctagactgaatcctgaactaggagataaaagccaaactgcaaatgactttgactttacgaggtcaactgacaatatttgaatatagatcataacatagataaaagcattgaataaacatttaggttatctcagttcttgacactagtatttataacattatccttatttttaaaaaattcactgtgacatactcagcactaaaaaactataagtaaacaactctcaattcattaaagttgctgtttatatatgtatatacacaaacacaggaatgtatatgaaatatatattttatatgcatatattacctatataatacaataattttgtgaaacacttgataatgtgtgtgtatttacacacacaaagaaacacaaatagtaaaacaaataaggctaaaatttacaaaagctaaatataaagaaaatatgcatgatttttgtgctgttcttgcaatgtttctatacgttaaaattatcacccttacacagcactaaatatatatgttttctcaaaattcatattctgttagctgggcatgatggtgcatgcctgcagacccagctacttggaaggctgaagtggaagaatctcttgagcccaggagtttgaggttgcaatgagctatgaccacaccactgcagtccagcctgggtgagagagcaggatcctgtctcaaacataaataaataaagaaaaagacaaacaaaagaaaaagaaacaaaatttatattttgaaatcctaatccccaaggtgatagttttaggagctgggcttttgggaggtgattcaatcaagggggtgaagacttcatgattggcatttagtgcccttataaaagagagaccagtgagctagctggccccccgcacaatgtgaggtcatggtgggaatgcaccttctatgaaccagaacttgggccctccctgagctgtgaatctgctgccaccttaatctttgatttttcagcctcaaagaactgtgagaaataaatgtctatggtttataagccacacagttcctgatattttgtcatagcagccagaacaaattcagactaccagataaactctctttttacttttattttaggttcaggggtacatgtgcagttttgttacataggtaaattacctgtgatgggtttcgttgtacagatcatttactctcccaggcaacaagtgtagtacctgataggtagttttttgatcctcttcctcctcccaacctccttcctcaagtaagtcccagggtcttttgtttctttcttgtattccttgttctcaatgtttagctgccatttataagcaagaatatgcagaattgggttttctgttcctctgatagtttgcttaggataatggcctccagctccatccatgttgctgcaaaggatacgatttcattcttttacattggctgtatggtattccatgatgtatatgtactatgttttccactgttttctttatccagtctaccattgacagggatttaggctgattccatgtctttgctattgtgaatagtgccgcaatgaacatccacgtgcgtgcatgtgtccttatggtagaatgatttatatttatttgtttatagaccaagtaatgggagtgctgggtcaaattataattctgttttaagttctctgagaaatcgccacacctgctttccaaaatggctgaactaattcacattcccaccagcagtgtataagtgtttccttttctctgtaacctctccagcatcttttatgttttcactatttaatagccattctgagtggtgttagatggtatctcgttgtttcgatttgcatttttctaatgatttgtgcttttgagcattttttcatatcctttttggttgtgtgtatgttttcttacgggaagtgtctgtgcatgacctttgcccactttttaatgaggttttttctttttaatttgtttaagttccttatagattttggatattagatatttgtcagatgcatagtttgcaaatattttctcccatactgtagcttgtctatttactgtgttgatagtttgatttttgtatatggtgtaacaaatggatccattttcaatcttctgcaaatgatgagccagttatctcagcaagatttattgaataaacgtttttccatttgtttgtgtcatctcttaattttgagtaacgctctgctattctcactgtagaaatctgtcccctccctggttagttgtattcctaggtattttgcccttttggtggctattgtggatgggattgcattccttttttgagacagagtctcgctcagcagcccaggctggagtggagtggtgcaatcttggctcactgcaacctctgcctcatgggttcaagctattctcttgcctcagcctcccgagtagctgggattacaggcatgtgccaccatgcctggctgatttttgtgtatttttagtagagacggtgtttcaccatgttggccaggatggtttcaatctcctgacctcgtgatccacccaaataggcctccaaaagtgatcgtaatcttgatttggctctcagcttggacatcactggtttataaaaatgctactgatttttgttcattgattttgtatcctgaaactttgctgatgttgtttatcagctgaaggggcttttgtccagatgctatgtccagagaattatatctgcaaacagaggttgacttcctctctttctatttgaatgccttacatttctttctcttgattgattgcttggctagggcttccagtactatgctgagtaagagtggtgggagtgagcatccttgtcttgttctggttctcacgggaatgcttctaggttttgcccattcagtatgacattggctgtgggtttgtcatagatagcccttatcatattaaagaatgttccttcaatgcctagtttgtcaaggagatggaggcatgttgaattttatcaaaagcctttttgcatctatcaagatgaccgtgtttgtttttagttctgtttacgtgatgaatcacatttcttgatttcgaaatcatgcgttctttgttacccgctatgatacattgtcgatgaaaatggccataatttttctcctccctggttctatccccctttacaccatggttttagtcttgtcttctcaagtagtggtgtctatttaagcaaccctaaattctgtgactttcactgatcagttggatgtggtgggaggtttgtggtaccatcaccaagcagatttatgcttggcttcttggatccgtgtgaacaagatgaggctagttggctgatagatgagacaacaggtgggccataggttactcttcccagttattctagccaagccacattggtttgtttcccattcattagtcataaagcagttatgatttaagtacattttatataaattgttttaaccattggaaaaccagcacctagctatagtcaagcagacataagtatcataaaatatttgcaataaaaacatacataatgcctaaaatgcaaggtttgtttaaatgctgtcaatgatccagtgaaagatatggaacaggaatcattaatctcattttatactgaaggcagcagaatcacaaagaattaacttcttaaactttcttaggaggctaagtgtcagaaatttgaaccttgttatttttatttcagaatcaatgtatttttattatagtagacaacaagttttagaagaaatacatttgctttctctttgttttaatgaaaatgtgtgtatttttttttctttttatagttttcttttattttttgttgcatcccagtatttaacatctgcttggagtaatgactataaatgatagccaggcaagactcatgaacaacatatactttcagatttctaaggaagatgaagaaaaggagttttagacatgagatgactgcaggcttcttgatacatatttatttttctcatctactgctaccaatgagtattattatattatctataacaaaattctaccatccatttatgtagttgatacttcctgagttcctgctatttgccaggcactgtgccactactgtctatagtgggaaacaaaacagaatccctaagttcctggcctcatggagcttatagtccagtgtgagagagagatgactaacaagtaaatacacatacattaatttggaaatgataactgctacactggaaaagaaccagaaaccagagagaaaacaaaaggctagggactggtgatttagtagtgaagtatgagtgctgctctgggtgataagatgtggaatcaaaacctggaagcaaaggcgagcacagtggctcatgcctgtaatcccagcattttgggatgtcaaggtagagggatcacttgatcccaggagtttgagaccagcacatagggaaaccccatctctataaaaaattggaaagttagccaagtgtggtgatgcatgcctgtagtctcaattacttgcaagtctgaggtgggaagatcgcttgagcccagcagatcaaggctgcagtgggccatgatcgtgccacagtactccagcctgggtgacagagtgagactctgtcaaaaatccccaaaatacaaaaaaaaaaaccccacaaaaaaacctggaaacagagctggggtggagaagcaagcccaaaaaactgaacttcgtgggcaaaggctgtaagatgagcaagagtttcagacacctgagaaattaaataagcctcattaagtctgaaggagagggaacgaagcagagtgtgccaagaaatgaaggtgggaaaataggagccttataggccaaggtatagcattcaattatatctcattgaggcatgcagaaaaatagaagcagaagaattattaaacttgtgatctaccagcggaagactaaatttgggatcatgaaaatgggaaaaaatatagggcattgtttaaatggaatgacttttccagtgtagatgagtagaaagaaaacattaaaagtattttacagataaaatgaatatttcaggtgatgaattaatgtgggattttagaaataagttgatgtaaagcatgagtcctagatacgtgccttgataataaaagtgtaacctctcttacagaatatttttttcataacttggaaaaggtgagcagaaatcatgtgaaatatatttaactctccaatattctatgaagtttttacctaagtggatccataaaaactgctatggacacttaagagtatagtttatataaatgtatttgtaacgtacaaactgaaaatagaaatagaattatggattgttgttgtaattgtattttgagttatattcagaaattcattatgaatattttgaatgccctgtttattgaacttctaggaattttgtgtccttattaaggtctagaattgtatttgaactcatttaaataactttcatctgacttgctttttatactaataacttcaattctagccataaacttttattgtcaatcattcccagtttttattttcagctttttttttttcttggttttttgagatagagtttcacttttgttgcccaggctggagtgcagtggcatgatcttgggttaatgcatcctctgcctcccgggttcaagagattctcctgcctcagcctcctgagtagctgggattacaggcatgtgccacatgcctggctaattttgtatttttaatagagatgtggtttctccatgttggtcaggctggtctcgaactcctgacctcaggtgatccgcccacctcgacctcccaaagtgctgggatcacaagtgagagccactgcgcccgaccttatattcactttttaaaaatattattattagacaacaaagagccttatcttcatatgccggtgtgttccttaaatctattttctaaagtgaatcaaaatttcggagaatttattttccttgtgattatctgaatgtgccaatttcatatcaagtaggtattcaaaaactccagcagcatgtaggattacagttattataattgataaaccaaatggaacctgaactctttgggtgtggagaacatctccatctccagagcctggaacaatgtcttatacataataggtttacatataatagtttacacacaatattttagaaaactgtttacctgatatagtgggcatgacttgtcctgcccttaaactagaagaaagaactcaaatttccaggcttccttgcaactaaaattcagggatgtggcctaagttctaaatgaaacttttatttgaaagttggtaacataagggaacaatctctgcaaaagatagcttttactagaggagataatggcagagatacctgggaggttgttacgaggctaacatagaagagggaatggtagttgttacgaggctgagtgttagtgttcatggtgaacttgggttcaggacatgaagttcacgccataactgttacacaggagcagtggcatcttctcatgaggccattttttttttaaatttctttctctctctctctcttttttttttttggcaagcttttctgatttgaactgcaagactgtatctctggattttccaatgattgtggatgctatcaaccattccattaatttaatcatcaaatattttctgagcatctactatgagccaagttaattggcaacaggataagcaaagactagaagtacgcagtctttgtatttacagattctaatcatggatgcacgtgaccaataacaagcaaaaaattacagttttcatgtgataagtgctccaaataaatccccatacatgtcgatagaaacatgcaaaaagacaactaatctagtcttatgggatcaaagtaagcttcctcagaaaggcaaatctgaactaatctcagagcagggcttgccaagctgtggttgcagaccatctgcatcagaaactccggggatatttacagtacagaattctttaccaccctctagatttactgattcaaaatttatgagattttacacaagaatctgcaattgtattaaacatcacacataccaaaaaataaaaatctaacatagcaaatgaaaatgggttgactgagagaagagaatggatctagaatttaagtatcagggggaaaaaaaaaagactgtttgaatgattactgtccaatgatcgaagcacttgcagggatagatactatcaagtgtctgtatattaacacatttttatactgagagaaaaagccacagtttagggtcaaagagatattgattgaatcttacatttcccacttaacccattggctaatttgtgtagctttgaatctcaatatcttcattcaaacatcaaggagtgattataatgtcatgagaagatagctaagactaagtaaaacaaagttgtataaaggcaataaccagcaataaatgttggtttccttttctttgtgcacacatttttttaatctagaagagttgcctatggatggcatatgtttagtagttatgagcgctgatattatcaacacataaaagagtatcaaggaaatcagctgttaagtagaaacttaccaatggcttttactaattgccttaatataagctcaatggcatgtttatagtgcacattacagttcacttaggagcacattatttttagttgaaatatattatcgtattggatgaatagacataagggtatgtattcccttatgatcagatgttgtctctgatctagcttgccaaaaatatgaatagcaaaagaaaacaaaaggtcacatttggtcaaaactcaaagaaaggtattttaaatttattaagagtatcttatgaattttctaatgtttagcattatttatagtgaaatgtaatgttggcacagtactatcactcagatctaaagtcctttcttctaagagtgtaaaacagtattttctctttttattattagcatttgctgtcaatttaacatagagattatggaccaaaaaattatactggaaattacttctttttgtgcgtttttaatttcatgatactcttgatatgtttttgttgttttgcttttcaatgcaatcaaatattatgttctcattatggcaactcagtaacagttgagctgaatttccatggtactaaggttagtaaacaaggtattcttgattctagcagatgtgtctgatttgaaacctctgtttttaaggtggggatactcaagccagacacatgacaacaaacccaggaactacatgttaagaacttagtagcctcaggatagaaacatctctcttagcactcttctttttccatcaaccatgctgattatatggtcatttatactgaaacagttttccctttcttctctcttatacattaatgcataattcttgatatgcaatacagttgcattgtaatgtatatatatatatatatatctttatatgacagggctctaaaattttcaatgcagttcaacatcacaaagttcaccagtttgtacttcctcacatatttacagtagtttctgtggtccaacatccaaaaaaaaacctacatgttctcaccaatatgtgttagaatctgtatttagagatggatagatagatagatagatagatagatagatagatagatagatagacagacagacagatagatagataggtatagatagatgacagagaggtgtagattttagaaagatggtagatagatgtagattttagaaagctgatagagggatagactgatattttatatgatagatagatggatagatagatacatagatacatagatgatgtagatttttctcttctctgagattttggggttatgttttggtgttttagttttttttaaactcatgcttcccagaataaagtaatgatttccatactatgcaaagtgtttcatattttgtttcttctaatattttaaatttatcttatattacacccttttaatacactgtactccaacttaagttgtaaatctaaaacactaaaatgtctcctaggacaagactttactttcttatgtttttaattactttttattttttcctgttatattctgctttcatatttctaaaagcctagacttaaataacattttaaatgctttccctttttgatcaataggtggacaagtactgctttgttttagcttctacagagatgttcccttggacattggtttttgtttctcattgctgctgtaacaatttttcagggggcttaagcaatccaaatttattattttagaattctgtaggtgagaagtccaactggggtcttactggactaacatgaagatgttggcagtactgtattcctttctactctaggaaagaattgcctccttaatgtttttgggttctagaggtttctttggctcctgggcctattctcctacttcaaagctagaaaaggtgagttgagtttttctcacactgcatctctgagaccttgcagacatcattatatctttctctgactctcccctaaatctctcttccactccctcttccctgtgattacattaaggcttacctggataaccaggacaccctctcctttgatagtttattttaagctaagtggtaagtttaaatatatactattctttgttacagcttttagctaaaattaaatagaaacttttaatttttaagcttttaacattttaaaaattactatgattatttttctttgtgactcctctgttataaaaacacacacatgtaaacatacccacaaaatactttcctcctgaggcagttaatctaaccccactaatcagaagaaaaatcacatgaactatcttaataaaatatttctataattcttattaattatttagttacttttgcagatgtttttacatcctcataaagttctttagaggaggacatgtgttttaatcttctttctttgcattataattttgaaaaaataatttgatgcgtgaatatataaaaataacatttgaaactcttactaatctagtcaagggaaaatacatcaactggaattacagagcactgtttattctttgaatcttacatggctgtaagattctaaaatcaatgttgtataaaaatttcttattgtaaaactatccttgaaagacatccagtctcctggaaaatgcaacacatttgatctctcagtaaatctagcatttcttttaaaagctgaagtattggaccagatcagtgttccatctgctgaatgtcagtgaagtaactggcttggattttgatgtcagtggcacaaacataatgcaagttttaacatcccactgaacccaatgagatgctcacatgagtggatgcctgagggcctaaaaatagcttttcagacctccccaaaataaaataatgcatccttaagtccattattttttttcactccacatactcttcagcaagaaatcaagttggatcttttaaaataccgaatagccataatcaaaccatgccttctgctcattgcctctagcctggtctaactcatcagcatcatctattgtcttagcagcagtagtcttctaactggtctttctatccctttacttacacagtctgttttcaatctgttcttttaaaactctgaacagatgatatcactttctttgcagatttctttcttttttttttttgtgactatattactctgttttcacaatgctataatgacagattgggtaatttataaagaaaagaggtttaattgactcacatggccggggaggcctcagtaaacttataatcctggtggaaggggaagcagtcacatcttacatggcggcaggagagagggttagcaagagcagggaaaactgcctcatgaaaccattagatcttgtgagaactcactcactatcatgagaacagcatgggtgaaaccacccatgtgatcccatcacctccctccaatgacagtggggattacagctccctgcctcaacacgtgaggatttggagatgagatttgggggtgggcacagagccaaactgtatcagtgaccctctgttttacccagagtaaaaacaatattcctttggccaatgatgctgttcaccttgaaaatatagttggtatctttgttactatttatatttgaaatgtgatatatgcatatttctatattcttagatttgagtggaaaatgtttgcttttaggttttctggatttcagaactgtagataagaatcagaaggtctatctttttgaatatggcaaaaatgctagcctatggttccctttttatgaatatttcagccaccctttagaattacctatgaggaaagaaaaagaatctcagtagctgtaatctttaataaaacttatgtgctatataaaatatagtaaagaagagatgtccttccctgagaatagcacctgttccataggtagttggatttggtcctgtcccagaaatttaccccctggcttaaaacaaaatggctggaaacgagaatttatatcattgactaggcacacaatagaataagtttgctgagctaaagcacagtatatctgagcaggaaaagcagtgtgaagggccagcctgtgtaattttactcagaactcaattttgtagctgggtttcttaagtagttttcagcatgtgtgttaaagtagtctccagtttaggagggtcacaaaaatgtcactatattcagagtaactagaaccagcagtaaaacagaattctgtagagactacaaacttaaaatgaaaactttttccccccagccccatttatactactgataatttaacagcatgaaatgtgcttagttcccctcttcagtggtgaatgcatgctaatgctgcagacaagttacgggccttagttccaaaacctttaaaatcatattttgtggtttttacattctactcatcattttcttatttaaaatatgaatagaagatatgtaaataaatagaaagatagaaacatataatttaattttttgacatctgaatgaaagtaaaaatttcctttatgggctattttggaatgaccttattttttttttttttcagatggagtttcactcttgttgcccacgcaggagtgcaatggcataatcttggctcactgcagcctctgccttccaggttcaaacaattctcctgcctcagtcacatgagtatttgagattacaggcacttgctaccacacccggctaatttttgtatttttagtagagacaggggtttcgccatgttggccaggctggtctcaaactcctgacctcaggtgatccgcctacctcagtcccccaaatgctagaattacaggtgtgagccactgcacctggcctgactttgaatttgataacatgtcttatccttgtggtttaagttttctttattaatatttatatttgaaatttaatatgcacatacttatttgctcataggtttgagtttggtactgaatgtaaactatgaaagaagccaaaatctaacagaaatttagtaaaatttccagagaaattatttttgttccatagactttctttaattgtttggtcaaggagttttatggaaacttaaaaaattatgatcttctttccatcctttttgctttctttctactttatgtaatttattgatcaattgcttttaaaactcaatgtactgaaaacattgttattccaggttgcctgcattcaatttcaaattgaaaaataaaattaatgaaaatattcatttgtcaaaaatttaaaaatacactttttatgaaaatatgaacattgtatactacttgtattaagatctcgcttgtattctttccaatcatttgatccaaacatattaataaattaaaagttgcagtctatagtagggtaaagattgagtttttttgtattacttaaatattttaaacatttgaactcatcagccatgctgatgctgctttatgaatttaattaatttgtaaaaaaatactttctaggagctcttcaaatggatctagtattgaaaaacatgttatataacaaaatttgcttttcattctgtcataaatgtataatgagataaaataatcttgaggattcaatgctatagaaaatgagtcattccagatatcaagaaaaatgaagcatctaatttttgaatctcaaaaatagcctctcagaaaagagagcaatatacagaagtgttctgatgataaagaggaaaaataaagttgtaagaattttctagcagtagtgttttcccaagacatacaattgaaattatgaataaaaagcattaatagttgtcatccagtgatctagtagttttatttaaacttgaggttttttcttaattctaaaaactctaaaagaccatcatagaaattgaaatatttcagtctgacacagtttcacatacacagaataatcaaatatcatttaatttctacataaaagaaaactagaggtagttaaagtggtaaaactggattttattcaggaactattgcaatggggaaaagaggcctctgtgtaaacctggcctcaattctgagtacagcatagacaagtcaggaatgtacaaggagtagagtaggagggtctgtgcatgtaaaattactaagaggaaacatcagccgtaaagggcaattcaggaaatcaatgtcataagaaaagtagccgagtgtttgcagtcccagatgtactggtttcttagtaggaataactctgaacattttaaaataaaatataaaaatatttgaatgatcaaatcaaacattattcttatacaagaataaccaatacaatgtcaagtgttttaaatacatataatgaatgtgaaccattaatacgatcagtctatcttttgagtaacataaatgaagtgttatttgaccaattaatttagacttacaattcttaagttgatgggagaccaagtttatgaatactgctgcaatagtcagtgaacttaagtttcactatatttgtaaatctgccggatttatgataattacttaagaaattttgaaaatgtatatgtatctacataaatgtattaggcaacaggggtatgattttgaacagaacctagactagtagcagagtgattgtgtaagtcaggtttggaaaagatgatgggtaagtgaggaatggtcaagggatgtcttaattaagctgatatttatttaaaatatttgttcttttcacccctcattcatgccttggtagaaaagaacatcatttgtatttccaaaccaaaactgactcagaagtctcataacagcctaaatcaagggcctctttttatagcccaggcttatatgagttctctaatttgtgttggaaaccttttccttccttgacctctgaaaaatgtctttgtgttggccctcttcttgctttctgggtgtccatctttggacttctgttttgatccctcttactttcacagtccttcactgctgctcctcaagttggtcttcgttggttcttctccaccatgggcccaggtgacctcatcctagagttttaatcataatctttttgctgatgattcaaaagtctttcctaatatctgagtctcttagcttatttgttcactcatttaatagtactgatttaacaatcaacaagtagattctggatattagccctttgtcagatgagtagattgcaaaaattttctcccattctgtaggttgcctgttcactctgacggtagtttcttttgctgtgcagaagctctttagtttaattagatcaaacaaatttacaagaaaaaaacaaacaaccccatcaacaagtgggcgaaggatatgaacagacaggtctcaaaagaagacatttatccagccaacagacacatgaaaaaatgctcatcatcactggccatcagagaaatgcaactcaaaaccacaatgagataccatctcacaccagttagaatggcgatcatttaagtcaggaaacaacaggtgctggagaggatgtggagaaataggaacacttttacactggtggtgggacggtaaactagttcaaccattgtggaagtcagtgtggagattcctcagggatctagaactagaaataccatttgacccagccatcccattactgggtatatacccaaaggattataaaacatgctgctataaagacacatgcacacgtatgtttattgcggcactattcacaatagcaaagacttggaaccaacccaaatgtccaacaatgacagactggactaagaaaatgtggcacaaatacaccatggaatactatgcagccataaaaattgatgagttcatgtcctttacagagacatggatgaagctggaaaccatcattctcagcaaactatcgcaaggacaaaaaaccaaacaccgcatgttctcactcataggtgggaattgaacaatgagaacacatggacacaggaaggggaacatcacacaccggggactgttgtggggtggggggaggggggagggatagcattaggagatatacctaatgtaatgatgagttaatgggtgcagcacaccaacatggcacatgtatacatatgtaacaaacctgcacattgtgcacatgtaccctagaacctaaagcataataaaaaaaaaatttaaaaaaatcaacaagtattttttcaactagatctcctcaacatttctgcctagatcttccccaagaactatacattcaatttgtttcacaatggccccactttttaccagtaattacagttacctttatgtaattattatattattttatgcattgttatcagtgtctcccacttatgtttgaaatttttagggttttcctgagtttcttccttttcttcatacactaagtccaatcaacttcgatattattcaggcttctactttggaaaactcattagtccctttattcactagctcaaaaacctgaacttgtttcaatagttacatctgttacatttcattaacaaatactaaaagttacttgattaacaaggcagaaacaagaggaattatgaatgttattgaacatgtgtggagttcaaggttcaacatttactcttaaatagtaagtttactaaatgtacaagaaattaatgaggacttttcagtattctaaagcataatttggaagtttctatagtatatctaaggatgactaagtacaaatgaaaaactaccacaacagcaaaagctactatttgaactttttttttttatttcaattttgttttttattatttaagttctggggtacatgtgcagaacatgcaggtttgttacatacgtatacacctgccatggtggtttgctgcacccatcaacccatcatctacattaggtatttctcctaatgctatccctacccagcccaccacccccccacccccctaccctctaccacccgacaggccccagtgtgtgatgttcccctccctgtgtccatgtgttctcatagttcaactccgacttatgagtgaaaacatgcggtgtttgtttttctgttcttgtgttagcttgctgagaatgatggtagaactagaattgccatttgatccagcaatcctattactgggtatctacccaaaggattatagatcattctactataaagacatatgcacatgtgtgtttattgtggcactgttcaccatagcaaagacttggagccaactcaaatgcccatcaatgatagactggataaagaaaatgtggcacatatacaccatgcaatactgtgcagccataaaaaaggatgagttcatgccttttgcagggacgtgaatgaaactggaagctgtttgaactttgaattcgtgtttcagaaaacctttcagaggtcccattatctaatgtaaagggccctcaaagtcagatttgttgaaagtgataagattatacaagagatagaacatttatgacatcatatcactgtcaaaggacttattttaaaacatctcaaacgaattgattaatgaagaatttaaaatctgattgtggctaatcatgccaggctacatggcctctatccttgaacttctgaaaaaagaggttaccttttatataaaatcaactgagttagaaatcacatgcttattcaaatgcatgtattttatgatttaattatttttcatttcttagaccgcttaaggaaaaatataatgactatgagatattagggcctatgaaaacgtgggatgtatttttcaaacatgccaaacatatctatgagactgtaccctttgcttaaatttctctatatctaaaatttctgcttaaattgtgcatatctcttagtaagaaatgtatgtcactcactttgtaagccttatcctgacatactatctaaacttgataacccattattcccttatctgtgttttcacaaaactttatttgtacttattctatttatcagtgttaaaacagtatacaattaattaaatatatatctgctaatcactttcaaagccctcccacctatctactaaagtgtgagtttttaaaatcaaggtacattacctctccagatttatattatctattatcaagtggcataatgccttaaataaaataactatgcgggagttatttctgtgcttcatgatattagttttatgttacacaataatagtttaattctcagaaatactaccttggatttttgatttagagtttcaatcggtctttggtctgtgctcagccaaattttataccttggtgtcattctacttgtaagactaaaaaaataataataagagagaaaacaagccattatatgtaagtatattctgttattgtcataaaacacctaccttatatataattgttatttattatgatcatttattaactacaccagacaaaatcaacaaaaaatatgtagaaattacctatgcagaaggaagggaaaacatgttttcatataatcctgctatagagttattctccatacaaaactcactaggctttttcctttaataaccaacattccatcctttttctatacagagaagcctttaggttgattaaagttcacattggcataaatgttttcaacatagtgaatgaattccagggaaaaagcagctgctatgtaagttatgttaatggctgggttttccttcacacaaaattgtatactgctccccctacctctgacacagaaatcacctcttgtgggctgtagtgcattttttttttaggtctagaaattggaaacatggatatttattgcagttaaggaactaagaattttaaagaggcaatttctggaagctggctgaaaaatgacctcattctccttcaagtttattgtccacacagtgctgtgctggcattccaagatgcacgacgtggttaaagtctttctgcacaggcttcaggggcatgattctcaataacaaattgtgcccgaatgcctgattttacttgtttcctaaagaatgctcattttataattcattccagtaggaaaacaacactataaacatttcaaaatatttataatttaaaatattaaataacattttctatgctttgatagtttagaatgagtcaaacattttaacctcttaaaagtgacagattggagtctactaggtaaaagttccacattttcagtttcctgaattaccagtttaagatatcatttgaccagcttgaagtatgatctatggaatgatgatgatacatgaaataattattatcaattacagacaagatcactatgaaaatcgagatgaagcatagaatgtaagaatttcggcagattaagtttatgtctaataaatctaacaattaaaaacatgatttgtacttgtagtcctccttttttatttttatttttatttatttttatttttatatatactttgctgaagcttaagattgggacatattaggaaaaaatgatttttcactatagatagtttgagaagcattgaattctagaaaagcagttttcaagatttgtttgaaatattatgtagaggctccgtccttgaaacagtaaatatggagcttgtctgtttaaagtatatacagagatgaaatgcagctccactttccccactggggcagaaatagggaatctcgggggcagagaaattacatcaagaacaagaagcacttacttgtatgcaacaaaacacagcatggaaagtggataaaaacttcaatgatggtaagtgatatttgcatgattatagacaacaaaaattataaacataacttaaaatttaaaagattaaataaatgctcaaacaataaccttgatctaatgtggcttaatgtatgtactgttcttagttatttgacttatagagaataaaacaacctctggccctcatgaaacttatattctagcaagaactgcaattcttagtttcataaaaccaacatttaaacatctgaaagcagatagaacatattaataaatcacggtataaggtattcctggtaagaataattttgaaaaaattaccaataactaaaggagggtattaagaattaaaaacttttcatcagttaaaaattagaacaaagcaagttgtatctgtcttgtagcagaaacatcaaattaatcagcttatttatgtttctttaaaatgaacaatttggctgtacattacctctctgtatttagtatttatgctaagtttttctcacagtatcataaagtgatggcaaaattaactacctgttttaatagagatgctgaatattctttgaaatgatggtgtgggagaccggaatacaccaccctaagatatattaatacttctttggcataagaattgttgacctgaaggtgattagaaagaagcagatgcaggaaagttctctgccctatctctatttgcccaaaagcgaaacataaatttgcaaaagcaaaagatactccacttctcctctctaccaggaaggccaaaggataaccactgaagaaaactttagactgtgatcagtctggagacggtatctgttgtggtttaaatgtttgtgtctcttccaaaattcatgtgttgaaactgaatttgcaaatatgatagcagtaagaggttgtgcccttaggaggtaattaagtaatggagtggagccctagtaaatgggattaaggcctgtataaaagacgtttgactatgttcgaccctcttgctctttcgccttcccccacgccaggacacagaaacaagacatcttggaatcaaacagcagccctcagtagacaccaatgctagtggcttaatcttggacttcccagcctccagaacattaaaaaaaaataaatttctgttttttataaattactcagtctgttgtattttcttctatcagcatgaaaagactaagacaataccagaggaatccacattaacaaacattactacataacctttatctgctatttatttgcatttcttcaggttgctgcccctagaggctcaaagctcctttcctttatcttgtcacttctctaaaattttctattctttttgatgatgtaatataagctgaaattcaaaaccacctttgtgaaaattactcatcttctatgtgtttctgggtgaaatacacatataaatcaatttttggtttttctcttgttaatctgtcttatgtatcaggggtccattttaacctctgaggcatgctacagcagggcttttgacctacagaactaggagataatatacaggtgttatttcaatccattcaatctaaagtaaatttttacagcagcaattagaaattaatatcatattctttccgaaaaggaaggcacttgtattggatcattgtggatctaacgccttccctgaaaacaaaactaaagtgcctactttactggttggatagtattctggtttctgacccttgcttagctcatgtatcacttgtgaaatattacaactaggccaggcgcagtggctcacatctgtaatccgaggaatttgggaggccaaggcagaaagattgcttgagccaaggagctccagatgagcctgggcaacatagtgagacttcatcactacaaaacacaaaaatgagtaggatgctgtggcacatacccgtagtcccagctactcaggaggctgaggtgggaggatcacttgagccaggtggtggaggctgcagtgggccatgatcacaccactgcactcccgctagggtgagagggtgagactgcattaaaaaaaaaaatcactactagttggcaaacataagaagttttgcataaatacaatgcccataattgtatcaatttgagtaatttcatttttttcaatttttactggattttttttgttattaagaacttattttgtatcaggctctctaccaagcactttagctacctcacctcattaaagatgctctacatttttaatagtactggaggaaactggggctggaaaacaacagaaaattagacaaaaactctagtctacataactattaagattgaatctcataactttaaccactctttctttgactggggatgtctagttatattctctgcagtaaactttgtcttttagtggcaaaaaaatggagaggattgcagaaacaaataaataaaaagatttcagttccattaccttttcttcctacaactattcaaagaaaacagtttccttcctcagttcctggggcagctaaactcaccaattaagttattcagtagaatcaataagcagacagattttgaatatttagatctattttactgaaagatttaacaaacatatctttgaaagcaaaatgacaagagagagtaaaaatatctatattcactaaaaatccttgctatatttattcattgagaaatctttttttgaattacaggtggtaacctttatgtgtatttcatgtaggtcaataatcacaaaactaatccacctagttggtttgggatattctgggcagcttcttttgtattgaagtagccttttttttttttttttttaccctgttaaaatgaggattgagcatctcatagaatcttgggggctgcaagatagaaattcaaattactagtgctagattaaaaattaccccacaagttgctggcatgaggtaacaacaactgaatttgcttaggggttctctgaatcagaaacttaggtaaagaatggcagggatggcatttctgagcgccacagtgtctttggccagagctggaagatttgaggctggatactggactcatcagaagctcactcaccaacatgtacaccagctgatgttggctgttggatggaacacctatgtgtggcttcttcatgtggtctgaacttcacttcaacatgatgttctagttcaaagggcaagcaacacaagaagaaaaatgagtcaagtggaggcttttcacccttttttgacctagacttgaaggtcatatagcatcatttctttcacaatctgagggttaaggaagtcacagttgtctgtccaggttcaagaagtatcaatatcacattgatacaaagaatgtcaatatcactttgtaagaagaccatgtgcaatgagatatatatttgagctgtcttttgaaaacactgtctgatgcagtgagggaaatatatgcataacagatgtgttggagacacaatgaaaaggagaaggatttttaacaaatacactatattaggtaatttttaaaaaaaaccaacacaaaaaagcaccagatacatttattaatataaaattccatcatgaaattattctcccacacctctttctcattgcaatgctcagtttgctatactgacttggctaggttttactctccagttattcatcaaacactaatctagttacttcaataaacacattggtagatatcatcaaagtccataatcagttctcattcagttaaaaggctctaagtttggaactgagatttagatgaagaagaagttctgttttgtctcatggccaagaattccagcctgtccttctgacagcctgccctatggatttcacctttcccagcgagagcccacaaaagtgtaagccagtttcttgtaattaagctcttaatacagatctaacactggttttctttctctggttggtccctaaatgataaaatcatcaaaagcatttatctccatttaggatatttgacatttattctagaaactgtaagtttaacaatgaataatgttgagtttcggaaaataataccccaaaatatggtgctttgacatactaaaataaagaagtagtcttaaggttgctgtggtcttaccccaccccttctgtctctcaactctctatctgtcccaaagcacagaacacagctgttctctgaaattcttttatctacctagaaaccaaacctgccaaaaaggaacacagttgccttcaatccgctccctgaaattttattaaccagagaagattagaactcatgtcacagaggaagagaattacaattaaatactaaaacctggagccccgacaaactctgttctctagtcccatttcatttccaaataaaattgtttcttaaccataatcagagcactgtctccattcatctgtccaaaaacctctttactgtacctaaaaaatagtcacatttctcccacttctccttctcctataaggaagggctaataacatctggacctcatgagttattgggtaatcattctcacgtatctccctcatgcttgttcatgttcaaaaaatccacgtgtcttccattaatctgtccactgttagttccttttcagcaaatctttaaagagtagaggggctgcaacggatttggttttacaagtgggacaaaccaaatccactctgctcttctggaaactgctataaaaggaacccagaacctgaccatggctgggcatggggggagatttcttacttgttagactcctgtgtgtctcagtggaaactgacagaggatataataaaaatttgtttttcttttttttttccaaattaagattgacaggagttaagtatttcaactctcagtatccatagaaagatcaaatttaaagggggatacaaatgaaatatagcaactacctaaactacccttgaagagattaaacatcagaaatcagatttaagacaaagttaaaatcatttgatctctccaactgcctgccttggatgctctacaggatttgttaaaaaggtgctccagactgtggtctcctggctgggatctaacactttcaccattgtgacccggttttactcttatctgtggcaccagtcacttggataagtaaatcttttgactcaggagaaaacatttctaaaacttattttagtaagtttcttttgatttaaacaaaaagtttgctgcttaacctatacgaatacctaataataagattttttaatactttaattttaagttcaggggtacatgtgtaggtttgttacttaggtaaacttgtgtcatgaggatttgttgtacagttaatttcatcacccagttattaagcctagtatccattagttatttttcctgatcctctctctcctctcaccctccatcctcccatgggccccagtataaaaaaaagaagagagatttgaaataattttttaacagctctatgatcaaaagttggaaacttttaatgaaaaactaatattcaagctacagttataagggcttctctattttttatttctgttggatttttcttcagaaacattttagttaactgaaacttttattctcccaaatctttgctaactaaaacttcactggtcttttttaaaaaacaaatgacttatttcataattttctgtgatgctattttgatcaagagtttaaactttattcttgacaaagttctaaaaaatcagatttaatattttcgagctcaaagtaactttttgatgtttcagaggttccctaaagcatccaacagagaaagaataagctaatcaagcttacttcatgttaattttatagagtacattgttaaataagaactaatatttaatcttctttgagctatatttgtatgaatgttattaatactaacatatatttgaaaattatataagatttctaaaattctgacatgtcttggtatatgttatcagttataattattgctatcatgttaaattcttgtgggccacagaaaatgatcaaattttcttgtcaattgcatctttatgcccattttaagcctttttgtcccgagttacttgctttattcttatgcttttgttttgaaagctccttacaaatgccaaagtgttgcatcttcaagaaaattcataggaaagactgcaacaagtactcttaaatacaagcttctggcaactttaagaccaaactattaaattgagtataaaaaaaatctgaactcataaaatttctaacacaacatcaaccagaataagaattaattatatagaactaaactgataaagacaattttttattactttggttcaaaacattgatgattatttttatgttttgttttccagatttaagaattctttttcttttaaactatttatggcttgcaagattttggtagaatattccgtgagcaaaattgaagcatgttttcactctgcaactgatcttccagaattgagaaactatttgtgagtattgttttcttatggcaatatagttatttcataagtccaataagaaactgttttattctgtaacaggacacgattggagattctggtaattgtatcaaggctctgactagaatgtcatattctgacatgacaagacagttttgaaagattgacatttacttcttttttctttatttcttcttaaaaaaataaaaggatacacgtgcagaacgtgcaggtttgttacacaggtatacatgtgctatggtggtttgctgcacctattgtcccatcctctaagctccctcccctcaccaggccctggtatgtgatattctcctctctgcgtccatgtattctcattgttcagctcccacttatgagtgataacgtgtggtgtttagttttctgttcctgtgttagtgaagacatttatgctgccaacaaacatatgaaaaaaagctcaacatcactgattatcagagaaatgaaaatttaatctacaatgagatattatctcacaccagtcagaaaggtgattattaaaaagtcaggaaacaatagatgctggggaggctgtggagaaataggaacacttttacgctgttggtggaaaagtaaattagttcaaccactgtggaagacagtatggcgattcctcaaggatctggaatgagaaataccatcagacccaggaatctcattacccggtatatacccaaaggattataaatcattctactataaagacacatgacattgacttttatgaaaacaacaaaaatcctcctggaaaaattgacctgataactcaaatacatgattcctgtgtttgcctttagaggtggatagagaatgtcacttcttgacaggctgagaaacctcaggatattttgaggacctaaaggagagaggaactcaccaaatttgttctgatattatagacctccaaggccacagcagctttacaaatgcctaatctgatgtttcttaccaaaagtttcaacaaagtctacttaaaaagaacctatgtaatcaatcactattcttgctgcactttatgcaaataatcaggccaagataatgagactaaacttattttgcaaaaaaattaattttatcataagtaactgttgaaaatggggatgaatgtaaggaagaaaaattatgtatcagaaaaaaaaactatagtgcacctgttattagattctagacccgtccaccaattttgagatttttattatctggactaaattctgaaatttagttctctctagtatttggccatgactctccaaactgttcccaattttttctgccaaatttttgatttcaaatcactagaaattaaaagttttttttaaactaaggccctacaagctgaacctagttaacttgtcactgaagaaaaatcattgcaactgcttatatttggacaaaccttgtgacatacaactacagtccaagcaaatatgacagattgccactgtctctctggctccaacttcggtatttcagctcatatgtgaaaatctttttaatagacttccctccagactcaggggctaggttacagactacttccgacattaacctttgcgtttttcttcctttttcatagaaatgcctcttattaaagatctgtttcccaaagtgcttggattataggtgtgagctgaggtcaggagtttaagaccagcctggccaacatggtgaaaccacgtctctactaaaaatacaaaaattagccaggtgtggtggcatgtgcctgtagtcccagctacttgggaggctgaggcaggagaatcgcttgaacctgggaggcggaggttgcagtgagctgagatcgtgccactgcactccagcctgggcaacagagagagagtccatctcaaaaaaaaaaaaaaaaaaagatctaaagatctgtttgcctacatcatctatagaggcatagctttgagaacccatctgccacaccatcttctgaaatgagacacaactaattaattgtactgtcccgttttcagaaacgggagactactttagtagaatcctttggcactcagctactaacttgaattttctctccagagccaccaactcagctgttaatgtgtataacctctagtaaagtttcagacaggggaatgttagggctcaaaaaatgatacatcgaaatatgtcactttgaaatattgaactgaagaagcagcctcaagatctcttacctctcacctctcctctctctcaaccctctgtctctcccaaagtacagaagaagatggcttttctctgaaattctcttatctccctagaaaccaaatatgcccaagaggaacacatttgctctcgatccctctctaaaatttcattaaccttagaagatgaaaactcataaaggaagagaacgaaaagtaaacaccacacctgaagcccagatgaacactgttctctggtcccattcaattcccaaagaaaacttattaatcagtgtctgcatattgactccattcatctctcctaaaaataattgactacccttcaaaaatcatcttatttctcccacctccccttctccaatgaagaaaggtatatgaacacctggatgtgactgtgttattgtgtattcatcctcatgcagttctctcatacttacgtatgttaaatcaatctgaatgccctttcttctatgaattctattgtcagtttattttctgtaaaccttcagagaacagaggaaaggctttcctttgacccctgcaatagcaatttcataccaatgtttagtaactggaactacagagaattagtcagtttccatctggttttactcatttagcgaaaatgattaatagcacttgcctccaatattataggactaagtaagcacttttttgagtgccatctatgaacaatgtgctgttgttcaaattagttgtgtacaagagaatagaataaattaaaagttacatgttgtccttttattccatattgtgggatagcattggcttttataaaaagtccaatttcactaaatctttgaactttttaggtaccaaatatcaaggattttgagtaataagcactcctattaagactttagaaacttgtgtctaaaacttcgttgctatttctgaacttgcagcaatccgaacgtgaaatctgaatgagcctgtaagaaaaaaaatgaaatattcaaagctgtacattaacccttgaagtccatagctgaatttttcaaaaagaaatgaatagaagaaaattaaacctcaattgaaacatgagagaatagtgctgtaacataaacagtatctcttttttgtggcaccagtttttcagtgattcaaaggaagaatgtttctagcgaaaaaaaatggttgctatggagttaagagttgagttaataccaacaaggcagaaatgctgtgggttaataattacatttgaatagattagcttgattctttgcaagaatatttttattgctgtgtccatatctttacttatttatattaaataagttataacttttatcttgtgaagaaactcaccatgggtgcactataaagcatttattaattgcttaagagattttatgccattttagtgatatttgaggcaggaattttctgtggatttttacatatctatacaattactgtatttcattaattgatatagctgctaatgtatcaaacacagcaggactgaaaatacagggaaatgaagtaaagttgctggcatagtctgataaaggtttgtgcatcagtagataatttctttaaatgacattatctagaatttgtgaaaagatagtttttttttttaagacagacataagtacaaaatgtctgcttctcacagggcacgtttgctttcagtgcacaataaagctcaaatttaaatcttcacttacatttactgcagccacattgcctttttcttgatttccaatgactctttgttaaaaaaataattttgatgccaatattgtacgcattctgcattccatatatcacttattgcttctttatttctgttactaacgactgtgctccaacgtttacctctttactcacataataaaaagaaggggaagccaggcacggtatctcacacccataattgcagcactttgggaggctgaggtgggtggatcatttgaggttaggagttcaagaccagtctgcctaacatggtgaaactcagtctctaccaaaaatataaaaaaattggccaggtgtggtggcacgtgcctgtaatcccagctacttgggaggctgaggcaggagaatctcttgaacctgtgagggggaggttgcattgaaccaagatcatgccattgcactccagcctgggcgacagagcgaaacgctctctcaaaaaaaaaaaaaaaaaaaaaaaaaaggaagtgggaagtgggggtgtggctgtgagggatagagatctcacctattttttttttatggttttcttacagtttcatctgaaaactcagagatatagatctctacgattaacaaattcttacatttcattctatataaaagttacttcattttcaaattccctaacttctttttaatcatagaggtattagtatctatttgcaacaataactaacattgtcagagatcacttttttcccctttcaagaattttgcccatttttgccctcttggacgctgactagctagctcaggctttaagatgaagaaaagacctagttcacatgatgtcaagtggcaggagtgattgggtcattaacttttaaaatgtttgtgtttctatctgagtatatttctgcaggaatgctacaaaacagctgtgtgatattaagtaggacattacaatgtaatgtataaatatatgtatactcctggaaaagattcttttcttcaccatattttagttagttttctgaaccttcttctaggcctctccgtgtactattttgtaaaatccagttttagcaaagaaccccgctgtattaatttaacaggaacctacctctccatccttgatatctgatccccctcaatatcttgttagattcttcattctctaccatcttctagatgatgtctgattaccctggcccatcttcagcaagaatattgctaggatgatttagtcagaatctcctttacccctgaatttactcttagagattttccatcctgtgacacccaccctgctctttggctatgaatactcatttgaccatgttttatttggagttgtgtccaacctctttttcccattgaaaatctcatttcagtgactcatatactgatcccaacggtcttgagtataggtatccttattgtgctttaattgaataattttaattgaataattttttgatactatattgtacagtacaataggaaaataagaataattttctggctttctactaagataatgttgaggattaaattaagtaatactttaaaaagttggctaaagatcaataacttaaatatttgtaaaacatgaatttggaagatgataagtaatttcttctaagtacaacatataagaattttttgtctcaatccacttaatgttacagattctattttaaaaataatataagcaagtgaaaaaagtaactaaaacctggtttatttaaatccatttacaccataatttggataattattacatcttagttatttgtaaaagaaccatgccagggagatatggctgtaagtcttctctgtaattgtgtgcccaaacctattaataaatttaatgattctcaatttttccatctgagaaatatagagaatgaccttgtggcatgttctaataattagaaaaataattagtaaaaaggtattttgcgtttagttaatgctcaacaaaccattattttcatttaggctataatttcttccctccctctctctctctctctctttttctttctttctttctttctttctttctttctttctttctttctttcttactttctttctttcttactttcttccttccttcccttccttccttccttcctccctccctccctctctcctttctttctttctttctttctttctttctttctttctttctttctttctttctctctttctttattctttctttcacacagtttcactctgtcacccaggttagagtgcagtggagcaatcccagctcactacatcctctgcctcccagtcccaggttcaagcgattctcatgtttcagcctcccaagtagcctggattacaggcgcccaccaccacgcctggctaatttttgtattattagtagagatgggatttcaccatgtttaccaggctggtctcgaactcccgacctcaattgattcgctggcttcagcctcccaaagttctgggattgcaggtgtgagccaccatgtctggccatttatgctataatatttcttaaaattaactgagcttaaattatgtttatattttattttataaaattaaaaaaatgctgaccaaatattagtgcttttattcaactagttattacttattctaacttgataattttcgctagcattttgtcattaagatcagatttgtaaaaattacaatttcttttcttgctatgcttattcacactctactatgatttatctttcctaagaccattgtggagacgttgagtggcatttgaagacactcgtaacagcatctttcagagacgtatagcacttagcctgtcagagttagcctgtcaaatttattcttaaaagtagacaaaagtaggatatctttagacctcaggccttatggttggttaaatttaaagcatcttataaactagtttcagtttcattatactaatgcctacgttaatgatttacatcttcttagctctgacaggagacaataaaataaattaagtggtcatgttgagtctaaagtaaccttttatcaattgacagtaattatttgtttgaacttttatttcatttaaacttgcatgaacttttaaataattatccatatagtctttcttgacagataaactttaaaaaataaatagctagaaagtcttacctggctttcttgtgtgattgacagttaaaattttaaaatgtagcatttactttacagaaggaaaatacttaaaactttaataatatcaatgtatagtctttgcatttgctatagtttgagtgtgtcctccatatttcctgttggaaacttaattcccaatgtggtaatgaaaggtggggcctttaagaggtgatttgatcatgagcgctctgctgtcatgaataaattaaccataactcagcataataaattaaatataaactcagcatgatggttttcaggaatttggaatattatgaacatgctggaatatgtatttgtcaagaggtagtagaagatatggtaagaatgttgagctggaaaaagatctgatgtcaacatactttctgtaaaaggcaaaagaataaatattgaggcatttcaggccacacactctgtatcacaactgctcaactttgttatataaacaaatggatgggttgtatttaaataaaactttatttacacaaacaggctagaggcaggattaagcttgaggctatagttttctgattccagtgctaggtaattgcacatatgtatataccactgcagatattatttttgaattgtattttacattttatttctatttttttctatttcagcccttgacctaaatcacatatcttattgaattaaaaaaagttttaagtttaaaattttaaaatcatttttaaaacgttctacttgaattttatgtttcaattgaacaaaaaacaaataaaacatgctaagatggcaatggatgaggacatagtctctcaatttgtattttttccacacctaaaacattcgagtgtttcaggtaaaaataaaaaagtttagaagttccttaagccagattttcaatttattttattttatttatgctaaagttttaaaaaataatgttacaaaacaacagataaaatttgtgttccttttaactcttccacaatatttattgttttttattgccttcttctcttgggtttaatatatatttcacgtccaacatttctatttttaatatacgggtcaacattatgtatatatatcacgtgttacatatatatataagttacatatatattactttatgatcaatgtatagtatagatatgtgaagtttgagacatataaatcttacattaatctttctctttattccttcaacttcatatttatgtttatagacaaatatttttttctcatttatgatcttattttatgtcttaatagtatattttcttttgttttcaactttaattatctttaaattatttattattattttttgagacaaggtgaaatggtacgatcatggctcactgcagcctctacttcctgcctcaagggatcctcccacttcagcctctggagtagctgggactagaggcatgcaccattacgacctgctaatttttaatttttttatttttactttttattttgtgtagctacagggtctccctttgtttcccagactaatcttgaactcgagggctcaggcaatactctcctctcagcctcccacgatgctgggattacaagcgtgaaaaaaaacacctggctattaattttttatttattgttttcattttttagtgaaactttagaaattacacattggaattccactttttatgtgaatatactttaaaaatattttattactcaacgttatctaaaatgtagcagtatatctttcatttcagcaattcaagtaataaaatgttaagtatcttagagtgtactcagtctagataaaatccatctacttttcattttatttatctacaatttctacacatttttatctcattttaacaccctccaagtttgttgtctacatcacttcatcatgattatttttatcaattatttttataataagtacatatttaacacaccaaaatatttaaaattccttagataaaccttaatacttctatatcattttttcctcaaaatcttccattctaaaattgaaaaaccattgatttttcagtaagaatctgtgaaaagtaactccgtttttatttcctactctatttcattgtcttgaaaagattctctcttattagggatttttatattgataatatttttttttagcgtttgaaaggcattattccatttcatcttattatatattttacaatagtggcctgattattagtcctttttaagaaaactgtgtttttttaatatatattttcttaattgttatggtctgaattatgcccctcaccacaaattcctgtgttgaagttctaaccccagggtctcagaatctgactgtgtttggatatagcgcccataagaggtaattatgttaaaattagggcattacggtggaccttaatgcaatatgactggtgtccttataagaagaaaaaattctgacatacaaagagacaccagggctaagtgtgtagagagaaaagaccatgggaaaacacagagacaaggaagccatctgcaagccatagagagaggcttctgaatgaaatcaaccctgtccacaccttgatctttcagtttcagccttcacaactgtgagaaaatcaatttctgctgcctgttgtactttgttatgacagccctagcaatacaataaatgtgactgttttcctccaacttccgaaggtctacaaccattttattgagatgcctctaagtgcagtatttttattagatgtgtgaggggcttcttacccttttctgcatagattataatttgtctcacacatatatctcatgtattatctctcttccacggactctctaaggttttctcatttccatcttctaattgacttgattttcgcttttgtatatgtatatttagtaaccaatatactatttaaacatgtcctctgagttttatttcggtggctacattttgtcgtttctagaattgctattctggttctgtttcaaatgtattttctcttttttttttcttttttttgagatgaagtctcgctctgtcgcctcgtctggagtgcagtggtacaatctcggctcactacaacctctgcgtcccaggttcaagcgattctcctgcgtcagtctccaaatagctgggattacaggtgcctgccaccacacccagctaatttttgtatttttagtagagacggggtttcaccatgtttgccaggctggtcttgatgaactccaggtgatccacccggctcgtgttttttccatgatatactatttgtaccctatggagtacctgtttttctacttagttttgaggactaagactgagtatttaaaattgccattcatattactctattgtgagttcttgcagtgcataatctgacattcattacatctactgactctcatagcaattagcttctttatgtatgtaagtacgcatgtgtgtgtgtacttttctctgtgagcttttcttcagaggtgattgttttcctataggagccatagctacctgaggtagaaatgtgtacttatgaagtgatgactgttgtgtactatagaagatcaaaataattttgtaattaaagagcagttatgttaacttctcagctccaggatgatcaacatcacagataacaagacttggtacctaacactaacttgggacatgggcatggggtttggggtttcatggtaattccttttctacccacgaccccaagtggatagctaacgattccttttctacccactaccccaagtggatagctaacttacataatgattccttagactggtgaacaggatattcaaatccccacttcacagatagaatgaacttcatggattattcaaggacattcaatattttcactgggcttgggcacaaaataattcactctcatgtggacattaaaatgtcagtaaccaggccctaagggctgtatccagtatggctgccccaaggttatgtgtctttggtgtcctctaccggctttgatttggagggttctcctaattctgatacctaaatattacctttattttactttgtactaacacttgttctagaatgcaaaatgctatgctttgtgaatttttatatttttgaagctgaatttctcatatcggctcaccctaccataggaataaaaattttctttttaaactatcagtgaggaaataggtttcagacgaattatacttaatggcaattaaaaatcagattttctactatgacttaataggaagtatttttccagaataataagttgaaggagacttccttctatagtttctaaaagtcatagctaattgctatttattagtgaagatccttataattgtaaacatttcctccaaaaagaaatttgaaaatcatttggaaactactaatgaaataccacaaaattacaacaaagaatgtttcctctcgaaccacaaattaaggaggagggaacagaatactgagtcacaatggaatatagagtagaaatgctacctacaaatttatattaaggagaaaaaaatgaagcctttctctcttcattgttttaattttcatatccttctcttgcctcattattcttgtatatattttttattgctgttgtttttgcttttttttttttttttttttttttgagacaaggcctcactctgttgcccaggctggagtgcagcggcgtggtcttggctcactgcaacctctgcctcccatgttaaagcgattcttctacctcagccttccaaataggtgggattacaggtgtgcaccaccatgcctggctattttttgtatttttaatagagatggggttatgccatgttggtcaggctgctcttgaactcctatcttcaggtgatctgcctgtcttggcctcccaaagtgctgggattacaggcatgagccaccgtgccgggtcttcttgtgtaaatttttaattcaagattttttcacattatattgtgtttgaaactaaaactatcaaaatactcactaaagtgacattttaaaataataaaattagggtagattttagttttctaaaatgtctatattactctactaattttgtagtaaaaataaaatttatgaatttaaattctgtatatcttagattcttatttgacctgaaaggatagcaaggaattaaagaggactaaaatgtcagactgcctctctagagagagtatgtcttaaatgagttcatacactgaattgatattaaaaatacaaagagaagaaatagaaaaaggctaatgaccggccacagagaacttgctatgagatgatgagcttggctttttcagcctcacgtataactttctattgcaaagttactaaatgtacagatatgacaaatatcagagagaattaatgtaatctagtcagcttagtgtcacatgatattaaagacagtatcaaaaacagacatgaaccgaaaattcatgcttgtgtcagagggcaaaaccaaccaaccaacaaacaaaaataaatctgtccttcacgggtttctaagaagttggtaattaaggaagtaatttattgggtaaattttatttctttcaaaaacagatgtttctatctatgatggttaatttcatgtgtccatttgactgaaccacagcacccagacatttggtcaaacattattctgaattttctttgtgggagtttttgaatgaaggatacatttaaatcagtggacttttgagtagagcagattgcccttcctatgtgagtgggctttcttccttcagttgaaagtccaaatagaaccaaaaggcagacctcctctgagcatgagagaattaggttaacatatatacatatatatatatatacacgcacacacacatacacacacacacatatatatacacacacatatatacatatatatacatgtgtatatatatacacatatgtgtatgtgtatatatatgtgtgtgtatatatatgtgtgtatatataaacatacacatatatacacatatatatacacactatatatgtatatatacacatatgtatatatatttgtatatatgtatatataaccatatgtatatatatttgtgtatatgtgtgtatataaatatatatgtgtgtgtatatatatattctccagagaaacagaacccatagcatatatatacacatatatgtgtatatatatatgtgtgtgtgtatgtatattctccagagaaacagaacccatagcatatatacacacacacacacacacacacacacacataatatatattttatatatatatatgcgctatgggttctgtttctctggagaaccctaactaatacagttctcacagcttcctcacttcttattttcagggctaaaatctatgctcgatctctcattccatttatctaagactgtaaagggtaaaatgctatgaatttttgcacagtccagttaaattaaaaaaagacgaaaacaaaaatgatagtccataaacaacgttatgttaagagtagtgttttcacagtcatattttcattttttagataacatatttttggatctaacagatttatgttttaattattttgaaattacatctattctaaaatacacattcattcccaactttaatgtattttgcattttttaagttgtttggttgaaattttggaaacataatccaaaactaagatgtttaatataataaaattcccaaatgagaaatgtcagttcaaatgccaaattaaaaatcttttaaagttgtatttttctgttcatatagatttttaaaaaattttccaaactgtccctttgtattttcaaatatgtgttatctgtaatagtctttcaacaaatattcatcacccaacaatcgtgtgtatggctctgggaatatagatgggaaaatggaataaaaaataaatttctacttagaccttaatattatttattaagaacaacgggctctggtgtcaagcaagcacgagctcgaataacatgtgttcgttatatggctgcgggcctggtgcttcatctaataaacttcaatttccacattgcaaaccagagatgataatgatatatacatacagagcctctaggaaaattaataacgacaatgtgcttagtgtgctcagcctggcatctggcaaagtatgcctgcatcagtgttaacaattataagtatgtttcctgtctctaaagctggtgctcattgcaccatccaataaatgactcgattttatctactacctggctttgtccatgctgttgtcatttctactttgtataaatatctattctggagattactgagtttttaacagcttgtcaaaatcaatattaaaataatagcttccatattttatgaagattagggataaatggaagacaatctactttatcctcagttagacaggattttacttaagtccctcaaagaaaaaaatcaattttaatctttatctctgtagtgtctcctgctaatattttatcaactcttagaaatccctaccagatcttgtctacatttatatgttactcatcactcttcattctgcatgattgggcttagtggaggccaccgggttatcatcagtgacaaaggagctgttatgtattatataatacaatttgtcttctcaatattgtcacacccagaatattccttttttcattgcatttctttatcactaattttaaaacgaattccattgctttctccagaactctctttacatttcccaaagaagcactgattttgattaggaaaacaagtcaaggcacaactgaatacaacataagaattacctcatggtttctcagtgcctgtctcctatttagaaattcagcactgtgtttgctttctccagagctgtatcactcatggctagattcttatctactatgacacttagctattctttggccatatttgcatttctcatatttttgcattgaaaatttatgtttctcttcaaacatactaccctcatcttatcttgattgcatttcttccatgtattttttcattttccaagttcacgttaaaggtggtgattttatcttctgcatttgtagccaccttcttgtcctctcttgttttttaatgttatctttggcgttaatgagtacagagaatattccatcaccctgttttcataatgtattctgttaaataattcatggattaacattaaccacacatttctactaagaactttattaatgcaatggttatttcaattaactttaattgactaaactgagcatgaatcctaagctcttggttttgacatccttccagtgatgattactttgcattaactctccacttactaaaaaatctgtgtttaattatacaccctaattttcagcactgtctgttacttgattctaacgtgatttgaatgttatcttcctttatttttagaaagtataaatattatgtataagaatgaagacacaactgtggttggctggtggggaaatggagtaaaaacggtaggagcagcaacagaaacatgtcacattacttatttgctaccgtctgaatgtttgtgttcccccaaagtgtaaatgttgaaatctaacccccggtataacgatatcagaaggtggagcctttgggaggtggtaaggccatgagggcagagcactaatgaaggagcttagcggccttataaactcctgaggacagccatttataaattaaaaagtgggctcttttcgtacactgttggcaccttggtcttcccagtcttcacgactttgagaaataaatgattgttggtttacgcacaacatgtctatagtacatttttattagtcccagtaaactaagacaatattattttattctttcaggcttattaatacattgtacaatggattggagattcaaaggtaaacaatgtaggagagactatggggttgtaaagattttatttgagagataaattattagcaatgcaaataaataaagatgtgatatgctcactcatgggggcatgggttcagaagagcccatacaaatggcttctattacagaaaagtatggagagagcattcaggaaaacttgacctgggaactgatgaatgaatagaattgagtctctcgtgtgtgtgtgtgtgtgtgtgtgtgtgtgtgtgtgtgtctgtctggagcaaggggccaagaaaaggtggtgttaggcagaggagaaacttggagaaagaactgctgaccaaacaaatgtgaatcttacaaaaaaggacagaattaaattttgtgtagatgctggggcatggcttggggtgttgtttgaaagggagacaggtgtaagctcttgaaatgccttgtaagctgggttgaacagtaccaatagtgtcctaattttggacaattttgccatctactgagatcagaaatcaataacaggtgctttggtgagcaatatgatagttcattcggttttgggcaagctgaaatggagaaacatattgtagtttcaacaagagacatcaagtatatagtaggttttagaaatttaaaatttgagagaggaattgaagaattcagcctgaaactatcaatgtgcaatttgtcaaaaaaggtggtggatgaagccatgatagcatccagctcatctaaaaatgagcctacaacagagattgtcatgagcagtagcagtgtaagagcatggtaaagaatatgaaacaaaacatgtatttttataatggaaagagtgctcagttctgttcagtgtgttgatattgcaaaagtgtctactctgctatcgggggatgttggtatgagacttgggaaagcgcagtttaagtacagaagtggcatcataaatccaaatagaatcaatagaagaataaatagtgaaatattaataatagagacactgagtaaagacagttatttcagtaagtttgatcttcagaaaatggaaaaatctcaaagtcaaaatatccttgagatgtaagaagaattttatattgtcaagtacaggatgatgaatcctatttaaatgctgaaatgaagtaagctattgctacggtttgaacatttatgcacctatcaacatttatgttgaaacataattcccactgtggtggtatcaagaggcagggccttctgggacatgattaattcatgggggctctgcccttaagaatggattagtgccttataaaacggccagtaggaaataatgtaggaacttttttgtctttccccccttctgtgaccggaattggtgggttcttggtctctctgacttcaccaatgaagccgcagaccctcgcgtgagtgttacagttcttaaggcggcacgtctggagatgttcttcctgccagtgggtttatggtctcgctggcctcaggagtgaagctgcacaccttcttataaagtcagcgtggacccaaagagcaagcatcagcaagatttattgcaaagaggaaaagaacaaaccctccacgatacagaagggaacctgagccagttgcctttgctggctcaggcagcctgcttttattcccttatctgaccccacccacatcctgctgattggtccattttacagagagctgattggctcattttacagagagctgagtggtccgttttgacagggtgctgattggtgcatttagggaccttgagctagacacaaaagttcttcaagtccccactagattagctagacacagagcactgataggtgcgtgtataaaccttgaggtagacacagggtgctgattggtacatttacaatcctttagctagacacaaaagttctccaagtccccactagattagctagatacagagtgctgattggtgcatccacaaaccccgagctagacacagagtgctgattggtgcatatacaatcctctagctagacatgaaagttctccaagtccccaccctactcaggagcccagctggcttcttcccctagtggatcttccgccggtccatgggcggagctgcccgccagtcctgcactgcagcgccggcagtccttagcccttgggcggtggaagggaccaggccccgcggagcaggggaggcttgggccgcgagggagcccacggcggggttgggggagggctcgggcatggggggctgcaggtcccgagccctgccccacaggaaggcggctgagcctcggagagaatttcagcacgacgcgggaggactggcagtgctggaggacacggcccaccctccgcagctgctggcccgggtgctaagtcccctcactgcgcagggccagcggtgcaagccggccgcttgcagtgcgggacccgctgagcccgcgcccacccggaactcgcgctgtcccgccagcgcagcgcgcagcccgggttcccacccgcgcctgtccctctacacctccccgcaagcgagggagccggccccagcctcgccagcccagagaggggccccacagctcagtggcgggctgaaggcctcctcgagcatggccagagtggacaccgaggccgaggagacgcggagagccagcgagggctgctattgtcacctctcatttccatcaggtaaggccgtagcgtttccaccttttgtcatgtgaggatgtagcaggaaggtcctcaacagataccaaatgctagtgccttggttttagactgctcagcctctaaaactacaagaagtaaatttaaggtttttttgttcttttgtttgtttgttttgagacggagtatcgttctgtgcccaggctggagtgcagtggcgtgatctcagcccactgcaagctctgcctcccgggttcacaccattctcctgcgtcagcctcccgagtagctggggctacaggcgcctgccaccacgcctgactaattttttgtatttttggtagagacggtttttcaccatgttagccaggatggtctccatctcctgacctcgtgatccgcccgcctcagcctcccaatatgttttctaataaaatacggaggctcgggtattttcttatagtcgtacaaatggactaagacaattgtgatgagttagaatttaaagagaagaaataaaaagagcaaaaacctctgaaaaggcaagatgtcctgaaatacagagattatttcaaaaagacatgatacaccttatcttcataagaagagagaattgggggagaaaagagaaatcagtacaagtaggcctgtgtattcgacagcaggaagttgaaatatttccttccttttattttgttgacaaaataacaacatgtcaatctgtaagacagaagtaagtgcaaaaaggtttggatactgaattggtatgagaagctctgaaaaacgtacagtgaggaatgggagagaacactgattaaggaacaatagaatgattgctgcataaacttggtgcctccattaaataaatgagagaggaaaccaattactctatgtagatggacacttcatagacaagagtacaatagttttcaaggaaacagcagcaattgcaaacgtttttaaattatatagtatttatctttgggttcggggagtagtgtgttcctgggggttccagtatgtttaagaaagacttttagaatgaacaagagattgacaagattattaagtcccaagaggaaatacggattagacaagcatcctaacctccgtgaactgctccaggcctgacaggaagaagaataactgtaatgtactaacaatcacaaatatagtagctaagatatatatgtcatacgttgtcatgacaaattgtctatgcaaattatctcatatcatcatctctgcaaagttatacaataaaattatcattttctccattatgcagataaaacaaaacaaaacagaagcaatggcagaaacacaggataaggcctccaagtcagggcattctgggatgttttagtttattggatataacgatgatatttgtattaacgtaagcttaggggcattaagtttgctgactgtatcttgcttaccatacataaaacccaatcatctcctcctcaagggagatagcacaaattgacctaagcagttagttttccagcttaaaattcaaaattggttttcatattaggtttacataatctccttgtaaactgacaaccaatcaactaaaattgaagttaccctaggacatcaaatatacgacacgggaaaaagaactaaaagccaaaactaaaactttaatttggaaaagaaagattaagacacctactgtatttattgacccaaggaaattatcaaatctcccaggtggaaggagtgaaaactctctcctccggctgtaaggttaatttcttaactagtccatctgctatagtcttattctatgctggtatgactcttttgtccaatgtgctttatggtccctaactttgttccctggaggacttttgcttatatatttcattggtaaactagagtaaaaggaagcttgggaaaaacttaagagattgtactcatctagggatgatggtgatagcaagtgtcaaaatgaagagattgatttctctgacaaaaatattaattgacaaattgtgaggttctgttggaaattactgtcaaaggagcacaatattttaaaaattacttctaagatttaaacaaaccatgtagtagaatagcaatgacaccaaaagtaacagagcttttttacctctcctctgaagaaattagtctgtccagcagcacaatgtgagaaaacaatggtactccagaaataaatttgaacttagattattaactgtgattaatatacttaagtaatcaaaactactatgatctaaatgtaaaacacaaaactgtaaaactcctagaagttaccacaggagaaaatctagatgacctagggtttggtgaagactttttaggtacaacactacaggcacaatctatgaaagaaataattgaaaagctgtacttcattaaaattaacagtttctgctatacaaaagacaatgagaagagaataaaaatagaatctacagactaggagataatatttgcaaaagacatatttgaaaaataactgtttcccaaaatacacaacatttaaaactcaacagtaaggaaacaaactacccaattaaaaaatgggctaaagttcttaacagatatgtcagcaaggaagatagacatatggcaaataaatgtagtaattgattatccacattatgcctcatcaatgtaatggaaaaataataaaacaaagaaatatgattacacacctgttagaatatctaaaatccacagcactgacaacatcaaatgcttgtgaggatgtcgagcaacaggaactctcctccattgctgatagaaatagaaagtgatatagccactttggaagacagttggcatttcttacataattcaacttactcttcccataagatccaacgatcgctcttgttggtatttacccaaaggagttgaaaatttatatcaacaagaaaacttacatacagatatttgtaatggctttattcataactgccaaaacttgaaagcaaccaagatatccttcagtaggtaaaaggataaactgtgctaaatgcagcctatgaaatgttattcaaacctaacaagaaatgaattacagagtcatgagaagacatggaacaaaacttaatgaacatttttaagtgaaagaaaccagtcttaaaggctacgtacttcatgattccagctatatgacagtctggaaaaggcacaactatgaagacagtaaaaagatcagtggttgctggggtgttggtgtggggagggaaagatgatcggcagagcacaaggaatttttagggaagtgaagcaactctgtgtgatactacaacgatggatacatggcattataaatttgcccaattctatacagtgtacaagaccaagagtgaagccttatattaactatatccttggataataatttattaatattgattgttcctttgcaacaaatgcagcactctggtgggggatgttgataataggggaggctacagatgtgtggaggcagggggtatatgagaaatctgtgtaccttctgctcaattttgctgtgaacctaaaacttctttaaaaaaatgaagtcttttacaatgttggtgagagtgtaagttagttcaaccattgtggaagacagtgtggcgattcctcaaggttctagaactagaaataccatttgacccagccatcccattactgggcatatacccaaaggattataaaccattctactataaagacacatgcacacatatatttattgtggcactgctcgaaatagcaaagacttagaaccaacccaaatgcccatcagtgatagactcgataaagaaaatatgacacatatacaccatgaaacactatgcagccataaaaacgattgattgagttcatgtccttggcagggaaatggatgatacaggaaatcatcattctcagcaaattaacacaagaacagaaaaccaaacactgcatgttctcactcataagtgggagctgatcaatgagaacacctggacacagggaggggaacatcacacactggggcctgtcgggggatgggggactaggggagggatagcattaggagaaatacctaatgtagattacgtgttgataggtgcagcaaaccaccatggcacgtgtgtacctgtataaaaaacctgcatgttctgtacatatagcccagaacttaaagtataaaaaaattaaaaacatgaagtatattaagcatgtaaaaaatgctactataatcttaaatatgttacaataacgtgtctataaaatatgagccgagcacacttccacagtgtaactcttctagctcatatgaataaagtatgtgtatgtgtgcatgcattcacatgcaacttgcaaagccaacaaatgaattctgaaattaagactttggctgatggtgtcttgaatgttatttctcaaatgactatgcaatacttaccaatttaaactccatttataatttttcctaattctttgtcaacaaacaatattattgattctcttttatttgtgcatactgtaatgtccctttctgatatatttgtgagatctattcattagcactgggaataactatgcccctccttgttttctgtgctagtacactctacgttatttgtttccctattcaattacagatgttagacatttgtatactttatggtccggttaactcaattaagtttccagctggttggtttacctatcccttcgtatcatgaaacttttataactatatttggattcccatcacagagtgacattacctgcttgaataaacttaagaacgtgattaaatcattgcaattgtatggattgttgattctgtttgtaagtaaggttacgtatttttcccttttctctcaatatttctctctcttttctattatgcatttaggcctactgtgttctgtgatcactggttctgggaatgggtgtgactctgaagaaagcaggaaagaaccattaataaccttatagagattttcatgccccagagttataaataatacacccaatgtcgctcatgccctgaagcctgacatgggaataacagttattctcctgtgaaaaatagccatcatgcaaaaggatcagattagtggcagcccacaccgatgagtgaggaagtctcagagggctcccatgtgcacaagctatttgaaggagaaatggaactatgacattgcagtcatgttccagactattgataactggggcgggggtgggggggaagaaaggaatcctgttgtttaatttgagtgtgatcaccctagaagaatgggggttcaaattatagtttaacttgagttatgaaaaatgtatatatttaaaatatttaagtttaaggtttctcatctgttgtgaaataaaaaacaaaagaaagggagggaggaaggaaggaaggaaagggggagggagggactgagggaaagagataaagagaaagaaagagaaggagggagagagaaagagaaagggagggagggaggaagtaagaaaggaaagaaggaagggaggaaggagagaagaagcaaggaaagaaaagagagaagggggagggagggaagaaaggaagggaaagaagaggccctcagttattagtcttatcctcattctcatattttagctgttatatatttgacttgttgattcactattcattgaaataatctagcaataatagtattcaactgtgtacatgagcttaataggtgatgcaaataagtgaggctagcaggccatgaagaattactttttaattttatttttattgttttcaatcctgcttcttctgtagagaattttaagtgacagcaatgctggaagggacgggaggagggcaaagattgaaaatcccttttaatggagactatagtttctttgttctagctagttattgcattatgaaaatgcaagccatatataactaggtgttttttcagaataagctggaaatgctctttctttattcctaaattgacaatattgaaaacactgtacaagaaaaaacataccgtgtctatagttttcatcctgcttttgtatcccattttgtgttctctgcctttagagtatttattttccaacttacatacagcatggaaaatctgtcatatatattacgaggttgccaaataaatagaataaccaggaatcttctggttgaagtgctgaaagggaagtgagtgttcccacgtcccacacctttctttccaccatgggtgccttcaaagaacagaaattcaaggtcacaggccaaaagaattccatgttgttgtttctagaaaagccaaatgaataaactattagagtaaacagctctcaaatcaagagattaaaaaagcatttatgtagaaacttgggcatccagtagcttcaatgctactagtgaactttcaaatactttaagctatttaatagacaaacatactttaaaaaatattgggactgtggaatcctatcaaaattcttaaaaatcactgtgcaaagcagtgtagaagtgatattttgctttattttgacacttaagtaagtcccttcattatttttagaagaccttgccctgtattttatagtttaccttttctaacatgtgttattcccttttccaatttaatcatcaccacatcctgaggggtaagacaaaaatccttactgacacttcatttttagcattcttttttctcatttgcctttgtccaggggcactagaaacttcacaattccctgcactcaatgagaagctcatagttccttttttactcagcattcacattcaaaaagtctgtgcagtttctatgaactggaaaattggctatccttgatttcactatcttagaaccgaatatattaattacatattaaatagcatgttaactcttaactgaatttattaattacatattaaatagcatattaactcttacaaataaattactgtgattttagaagctactgcttatcatattgtctctgcagccttttagaggcaatgatactacaatctatgtattagtaacaccaatggcaaggatttcaagatgtggccagctagagggcatattgcttaaaagtccaggattttagcttacttcagacagtgctacgtagatgacacacagtcagtataacctgatcttagctctgaactccagacaactccatggaaaagaagctaatgtccttgctgtaacagatcaaaaactgcgatctctgaaggatgtctaaaccgtcacagcaagtcatagggggaatattctcttgggtctgttagctgttttaattttaataattcaagtaaatgttaagatttacaggattgagctaaaacagtttgcttactgtagcttctagtgtttccgaatatggaaaatatattgtcaaaatatatttctttctttcacattgtaaattatatggatggctcaccataccataatttatttgcaaacctaattagtttttagaatttacatcaaatatacattgcttaaaaacatggctagtggatctaactatttcacatagatattatgccagaaggcatattataaaaaacatttaaacactccaatctggataacagtgaaaagttttctacttaaaatttatcttataatatccttaaattatctaatcttccatcataagaatggcttagctttactagttcaagggctatgtaagataatataagaggcaagcttcatctttagtttatattcttcttcatttgtcattaaacatcttataagcctgccatttttatctggctttaaacagtaagtggagatgtcagaaaatacgaataatatatacaatttcagattcaaatattgaaaacagaatgtcatttttttctttttctcctgtggaattattattcagaaaacacttcaggtattaggcaatcatccattaattacttagtggttattattaacaaaatgccgttttttttcctaaagaaactattgattttgtgaaagcatgttaaacgtttaacacatcctttcattcctggattcaaaagtatttattgagtgttcactatatgccaatcactgactattgtcaaaccatgtccgtatgaggaggaatgaatcaccatccctaacctcaagaaaattattccctggtgaaggagacaaatatatgcacattatagcacagcattcttggtgccaaaaggagtatgagtgtagtggtatggttgctctatgagaaaaaaatgctgacatttgccttgggaattactgttaataatagaatagaaatcggccagtgggcaaagtggtgaaaagcattccatatagattaaagacacaaaacaattaaagatcattgagaattcagagaactgtgagcacttaagtattcctcaggtgcagcatgtaaggctagaaagctaagtggagttatattttaatagccttgtgagtcaagccacattttatgttgtaggtaatagcaggccattacactagtgactcctaatctagagtgtgcatttatttaccttctaagttgagagagagagagagataaaacacctaaattgagattctactttagtaaggctggaatagtagtgtttgggaaccagtattgatcattatcattattattttaataaccttcatcaggggtcctgacttgggctgctggctaaaactcacatcatttaagggttttatgacaagggagtagcataattagatgcttattttataaagcttattttggtatctgtatcaacaatgtatcataggggaagtaagcataaagaccaaaagaccaaatagaaagctattgtacctgtacaggtgagaagttataagtatcaatcaaagtctatgaacaggaattggaggatgggtgtggtggctcaggcctgtaatcccagcactttgggaggcagaggcaggcagatcacgtgaggtcgggagtttgagaccagcctgaaaaacatggtgaaaccccgtctctactaaaaatacaaaagttagccgggcatggtggtgcacgcctgtaattccagctactttggaagctgagtcaggagaatcgcttgaatctgggaagcggaggttgcaggagaaccgcttgaacctggggactggaggttgcagtgagccaagattgcaccattgcactccagccttggcaacaagagcaaactccatctcaaaaaaaaaaaaaaaaaaagaattgaaaattaaggaggctcacaaagatagtacctattttttatacatatatatattcccatttataaatatatataatatatatttatatatttattttctgacacacatatattacatatatgtaatttctgacgcatatatattatatatagtatatattatatatataatatgtgtaaatatatatatttacaaatgggaatgtgtgagagtgcttatttaaggcaattctaaatttctgatagagacagctggaaaattaagtgtacaataaatttaacttggaaatcattcattaattagaagttggcattttaaaagacctcgtttctgttatatactacatgtgtgtgtttgacaccagttataaatagaaattattaactagaggttttatttgaaaaataaaaggagtctgaagtcccaaaacaattaataattatctgatattcaattatattgtttatttggtgaaatctagattcttctatcagcatgactcactgtattggacagtcatttgattgagtacaggatctgataccaggttagagaacacggaggaaaacagaactgttagtaatagcatctgtcctaactacttaatgggaaaagacacagattcgcagcctgtttattaatgacatacatgtagtctatcttcaagaactcaagaactgagggtcagatgtggtggtctgcacctgcagtcctagctgctagggatgctgaggcaggaggatggcttgtgcccaggagatggaggctacagtgagttgtgattgtgccactgactgaagcctgagtgacagagcaaggttctgtctcttacgacaacaacaacaataaagaactaagaaattgtaatctggtgaggtagccatttccgtttgaggaagggagtgcttgggaatcccatcatccacagccagtattacctaatataactcttttcacaataactcttctagataatctctgggcagtggcttgctcatcaagagccagcattcttgccatggctgatgtttctccaatctctaccaaaggcttttccattattttactgttcttaaatctatattttacttcagtaagctaaggcttttcaaatacgaatctaattggctaaataattgcctccctagtcaattcttacttgttctatcccaaggagataaatgtgatttaaaatatcatagagtgcaaatactaagaaatacatttcagaataattccatatagtctctttgccttttgtaacactttttttcactctcctaggaaacttctttttttacaaataagaggcatacttctttttcctttttctactgtggtgttaaatataatggggttggatgcaaaatatataaataaaatattttttcctgttattattgcttcataaaattctaatatgttattatacctaaaagtcagttttctaatggtagtatgttatgtagtttagatatgctgaatgaaaacttaagatgatatatacattattcagtgtatgggatttaaaaacatgccatgtctaaataatttagaagcctcattcttgtagcgttttgaattaaaatataagaaacatccccaacataatttaatagtgcatttttaaattcaagatctaaattcaacaaaagttagaaaaatataaaaaagatttctattaaaaagtagactaaccagttaataatccagaagggtaattctaacatcaatcaattaaaaatagtattctccatgaatcatatctaggtcattttcctccaaaaatttcatatatatatgtatttgtgtgtatatatataataaatttgtgtatatatataatatatttgtgtattgtatatgtttttatatacaccaaactttgcatagcaaaaattttaaaatatgcagtgtgtacacatttttcctaatgcctgaaggcactgagatagaaacctcacattacccatagatttatctttctatgatgaattattgactatcacagatttgcgttaaacatgggaaaatctaaaacaagattcataacaatgccacatacttactgcatttttgctacagtaagtttaatgaatgaatctcagactctctgcaggaggcaagtgtttcaactcctccatgtctttctgagaatggcttaatctcaataaaagaaccaaattgcaggcaggcacatctggcatgaaacaacacatgcactacagccctcagtacagtaaatcacttcacactgggcactggcatgagtcaggtgttgacaagagttcttgcaaagcgtatactaatacaatgaacagttattatcagagttagataatcttcagacatataagcagtatgcacgagaagtattactgctaactttcattgatgttgcaatgtctacaaaaactgtaatcaagttaaagctgttcacaccctcccctaaaagtgtatcttttaagtcttctttacaattgttgtgttgtattccaggattctagatctcacgtctaattttggacagattttagttcattatacaaagcattaatgtgaattgcttctgtgttcccttgatttataatacatggctttatattaacagatgtagagaactctgaaaatcaaacaaggcaaaaataatatatggaacttggtggatttagttggggaaaagtacgtatgtttctgttttttatttgcaatatacacataatgtttctaacttacctgtatcagttgactctagttgtcttccagcctgcccatctcaacaattgtattatatatattcttatcctaaagtaattatattctatttttatcctaaaatatattctatatcgaatacattctttatctctatctaaaatatattcttatcctaaaataattaacacatagtgtaaacaaaatgtttacagtgctgtaaaaatgtgagaatcagaagtgttttaaaattatgttcaatgttttatcaatatgccactattttaaaagtatcatttatatttgtattatattttatatgtatttacaagaccacacaaagtgaagagtgttttgaatggatcccaaataattattttaaaacttttgtttttatgcttaaatagacaaatcagaacacatgttatttggtcaaatatataataggacacatgtaattactaaagtaaacagggctttagaaatcttattttttttttccttttgtagctaatgcctggattcagtatttcaaaactttgggaaaattgtttaattttacataatatacttggaaatacttgtaatataatagtaaatacctgtaagagctagtttcctgtttttgtattcatgacaatcgctgcttagtatcatagttgttatgaaaaatgcaacacatttttgtttcttctttattattaatgtatttaacactatagagttttgagttgaacacaaaccagtaactttgaaagaatgtaaatataacagaacaacaaaatgccttaaacataagctttataaagtcaaactggtgataacattctgtatttgttttttacccacatcaccttctaaggaaaaccattcattattctctcccctattctacatgggcagcatcctcaatggccaattttatatcatttaatccatatcttctcttttatggtcataatgatcagaccagaaagtggatacattactaagtttatggacatattgaaaatgtattgaaaatgctgtcatcattagataaaagataccatgtatgtggattttcgtacttaacgatttatactaagaacatgtgaggaatttgcctcccagtggtgcagaatcttctgcagagtcatgagttagaaaaataaagacaattatggagcatatgtccctgcagggtgggaaaccaccttgccacctgtttggtttctgagtggcgttggcattttgaggtcagggatgtcaaatgagggtaggttgaacagagcggcttcaaagagaaatttttctggtacaatcagtgaaacaactgctgcctagataaactctattccttatgagtgatctaatgctataaagattgatacagtcacatccagttaaatttgatgatcattagtttgcgctgaagtaaatccaaagtgacccactgctcatcagaccaacttaaggtctcagaacaaaaaatgccagcctcaggtataagtgaaattctatggagaagcatcgtcttacagagtagctctccggcaggcagaatcctaaaaaatcagatgtgttatctaaagaacttaatatactgtaacacacacacacacacaccaaaaacaaatgaataaacaaaatggaagaaaacaagagagggaggaaggaaggaaaaagagagaaagcccatgtaactgactgctttactacatactttatcttgacagatggttattttagagagacggccagagctttgtgctgtaagctgtcctttatctccttccctaaaaaggaactgcttctgcagtcttgctgctcttttctaattatttcatatggtagtgttattggtgttaacattcgctatttatttcataggctgccaataattagaaaagatgtctaaatataactcatgtgagctacgaaactatgaactatgaaaatggtgaatatgacttgaacttctggggctctaaaatttaaaacacttcaaatggctgtgacactttatatccgtatatattcctcactttttcttgaaaaagggatatgtatgtctttggtggtatgcatggcggtgagatcaacatttaggtagaagtatattggtaattagaaaataaaagtgtacataataatgattaaaagttaaaatgttttgaattaatctcaacctcattcatacacctccctaatgtaaagtttttgagcccctactcctttaactagatagtcacagttttaaacatgtcatcctagcaccagaataaacaataaagggcaatcaatctgaagactacccaatcatatatatggactctgtcacctttcttacaaaatgatatagcttaattattcacaatgttttttccaaactaagaaacagatatattatggcagtgtgttgctggagttatagcaaacagactatgaggatgcagtgaaagcagaatgccctgatgagccaggtgcaaattaaagcaatgtggggaaagtgttgtgcagtgaggcacaaaagctgaaagtgaactaagttgtgaaaagaaaaaagagcatgcgggttatagctgggtcatgcagaccaagaaaaacggaatttcatgggttctggttgtccagttgctatagttgctttgaaaaccagaagtagctgcactgttaatctctatgaggccaggctcactatgagtaatgttctggaataggcataagagctgcctcttccttatttagcattatgcaatccaaacaacaaaacctgttagtcactatttcttgaaactaaaaaataatagtaataagtaaataaaagcaaattgaggcaagtatgctgtagagtgaattcacaactgatttatgattattagtaggtaggaaacaaatcaatgagacagtgatatttgagatgagtcaagtaaagatggtagagatagtcaaggcaaagaaaacagtccaagtaaatttatatagcattctgaagtttagggaattaaaattactttagtgtagctgaggtacaaagttctagatacagctatttgaaagatgtgcttagagatagaaccaggggtcagatgatggaggggattatattccattctctggagtttgtatttgatgtctaaagtagggattattcacatctcatacaggcaagtgatctgtctaaatatgcactggagaaagacactttgaagagcccagtgaaaaatccagaaaggtcactctattctcttatagtactccaggttatagatggatatattaggtaggtgcaaaagtaattgcagttttttgccattaaatgtaatggcaaaagaagttagaattagcagactgagtaactggctagatgtgagaagtagagtaaatagcgggcctagaatgatattcaggttttgcagttgactgaatagagcggctgtgctcaaagattgcgagtagagaaaatttgtttgggagggaaccaggtcaagcagtaacaggtatgagtttggccatgttccagttgtggtgcaatacacttaattccaagtggaattaagctcagttacagcaaacgttctgcttggcatttccactgagatatctgatacacatcaccataccctgttcacagctgaatcctcattctgcttattttctcattaccctaaatggatataatatccatgcaaataagggctgcatttgctttgtggaccactctattatctgccaagcattgtaccaaagccccaaatatccatataataaatctttaaatgataagtgcataaaagagataaaggctgaaattagaaagttgattgtcaccaggctagagatggaagctaaaactttaggtgtaaatgagattgttcaggaattaagaatagtgtgttctgtctatgtaaaaaataatattgttacatttcttttcctcctagaatacctggaatgtaaatcctaaagttaaggattcatgagaataggatattgaaacatgtatctaatgagcatcagacagtgtgctagccactttacatatatatgaccctcacataaggtctccaagagcctcatcatgttttctttgattaattcatacaaattttagaaaaaaatcagtattaaaacttgaatgtattaatataaattttcttacaggacaatggaaatatatcacatgcaagtatacaatctgcacctgattcaaaaaatagctacatctatttcagcaaaagagtaaaataatttgttttgggaaaggttttgtttttaagtacattaagcactaaaatttacatcatgttaaatttacatgttttgcataagcctgggtttgactagcaataaaaaacaaaatcctgctgttacaatatctgaaaaacaattgtcataagaaaatttgtaactgatattcatgcttccattgcaaagacatcactaacagaatgcaaagctgatagcatagctgtatctcgtattcagttttgttcttgtgatatatgatgctaccttgctatgaatcatactgtgactcagacattaccaatgtgactactatttagttttatataaggctgtatttttttttccttctagttttggtgtggcctttattttgcttatggcatccttttttctagctttactgaagtataattaaaaagtaaagaaattgtacatattttaagttgtatcaaatgatttggtatacttttacattgtgaaatggctaccacaatcaaactaataagtacatctatcacctcacgtactttaactttttgtgtgtgtgcctgttgtgagaacactcgagagccattcgcttagcaaatttcatatataaaatgcattattaattaactatagtgaccataatatacattagattctccaaactgattcgtcttattactgaaattttgtactgtttgagcaaaatctcccagtttcccgcacaccttggccactggcaacaccattctgtttgtgagtctgactattttagattcgatacataagtgagctcatacaatgtttatctttttctgtctgacttatttcgcttagcataactttctccagtttaatccaccttgtcataaattacaggattttcttcattttaaatggtgaataatactccactgtgcatgcgcgcacacgagtgtgtgtgtgtacaattttaacaatgtattcatacatggacagacatgtttccatattttggctgtggtaaataaagaaaatggtagtgcacataactcatcttgttactaatttctttgcctttggatatatacctggaaagtgtattgctggattatatgaatattctattcttaatttttttgaggaaactcaatactgtttttcataataactgtgataatttacatttccaacagcagtgtataagggttctcttttctccacactcttgacaatatttgtaactttttttctttttgataataatcctaacaggtgtgaggtgatatcttatgcttttgatttgcatttccctgatgattagtgatgttgagcaacatttcttgtatttgttggttatttgtatgtcttctttgaaaaaaatgtcaactcaggtcctttgcctttttttttttaatttcatcacctcaaatatttatcatttctgtgttgtgaaaacatttaaaatcctctgttttactactttgaaatatataagacctcattattaaccatagtcaccatgttttccaatacataccagaacgtactacttacatgtaactgaaactctgtgcccattgaccaatgtgtcccttttctacatctaccttcactgctggcaccccacaccattttcaatcacgtaaattactttatcactgttgagttttatgtctgtcttatatattttaaatattagctccttatcatggtttacccctattgtatggtttattttgtctctattatatgttatatttgccccttattatatggtttgctcctattatatggtttataatatattagccctgatatatggtttgaaaacactttgtctcattgtgtaggctgtatttttacttcgttgtttcctttgctgtgcagaagccttttcatttgatgtagttcatttgtttatttttgttttgttgcctgtgcttttgatgtcatattaaaaaaaattgccaagacttcaaggagcttttacatttaaatttttaatccatttcaattaatttctgtgtatggcgtaaggtaagggcacaattttgttctttgacatgtagctatccaattttcctggcataattcattgaagagactatcattttcccatttggttttcgtgatacccttgttaaagattaatttaccatatatgaggggaggctttgtttctatctattttgttctattggtctatttatctgttcttctgtcagaaccatactgttttgattattatcatttcataatatagtttaaagtgaggatgtttctccagctttgtttctttattcaaaatgctttgactattcatggtcttttgtggttccacaaatgttttagaattgctttttctatttttgtgaaaaatgctgttagagtttggatagggattgcattgaatccgtagattgttttgggtaatacagacattttaacattatcagttcttctagtccatgtacacagaataactttccattaatttttgttttcttaaatttctttcatctttttttgtagttttcagttcacagatctttcactttgttggttaaatgtgtgcctaagtattttattgttttattaatgctattaggaataggattgttttcttaatttctgttttggatagtttgctgttatgtatagaaaaacaacatattttttatgttgactttttatccctctattttatgaattcttttattctaaaagtattttggtagcatgtttagaatttttgatatttaaaataatatgctttgcaaaccagaacatttaacttcttcctttctgatttggatgtctttttttttttatcttgcacagttgttctaagactttctgtactatgttgaatagaggtggtgagagtgggcatacttgccttgctcttgatttttgaagaaagcttctggcaattcaccattaggtatgatgctagttgtgagcttgtcattgtggcctttattatgttgaagtgcattccttttaaaaataacttgctgagtttttttttcataaaagattgttgaattttgaatgtttttttctgcatcttttgattgagatgatcaattttattatccgttctgttaaaaaggtgtatcttatttattgatttacatatgttgaaccatccttaaatttcatagatatgtcccactttatcatggtacattattaccttgtaataattttttgaattgagtttcctagtatttgtggcttcttcactcccctagtttgacgagtgagagggagtgttacagttcttccactctcatagttcagcaaacaggagggagtgttaccatcttttcactccacacgttcggccagttccaagttcttgtgtcacaaccaagaagaatgagggacgtggacaccagaaagtgcatgaggcagagtagaattttattaagcaacagaaagaaagctctcagcaatgagagacgacctgaaagagggttgccagttgccaggctgagtccaggatttctatgggcttggaatggggaaatgagtgctgattgatttatgagtaggcttagaaaaagtgccattcagaaagaggaacgatagtgtaaagaaccaagcagagactgaagtggaggcttggccaggaccctggcctggggccaatcaggagccgagtaggaatataagttctcactccagtctgcggattctatctggaattggtagtttggttttcaggcttcaggatgttgctggcttgaaggttgagttttgccagggacccatcacaatctgcctaggaatttgtctgcctctgattgctgtcattttgttgaggtatattgcatctatgttcaccaagaatatcaacttttaactttttttttttgtggtatccttacgttgctttgtaataggataataacagctcggaaaaatcagtttgcatgcatcctttccttttcaattttttggaagagttgaaaagtatttgtgttagttctttaaatggaagaattaacctgtgaattcactgtgaacattcacttggtcatggattttttgttgttgttgttagaaggatttttattaaacctttaatcttcttacttaatttttacttcagattttctatttctttatgattcagtcttagtaggtagtatgttttaagaatttatctatttcttctaggttattcaattattggattataattgttcatagtagtttttatgatcctttgtatttctctgttatcagttgtaagttctccgttttcttttatgattttgagtcttctctcttttcttaatacagacattaaaagctatgtacttccttcttataactgctcttgatgcatccagaaagttttgctatgttgtatttctatttttgtctgtagatacattttgattttatttttgatttcttctttaacctattgtttttcaagaatatgttgtttaatttccacatatttgtgaaatttccaattttcctcctgttaacctatctctagtttcaaaacattgtagagaaaatttacctgatactacgttattcttcttaaatttgttaatacttgctttgtggcctgcctactattccttatttagaatcaaaagcgttcttattttatccaaaaccttccatatgtatatttctgaatttaaaaaattgcaatagtagttcattattcattgaaattcttcagagtgtatcagtaattaaagtcttaaatatttttgtaaaagtaaataaatcaacataagaatgctataaatgtaggagattctggaaattgtattcactgtatgataatgtttaactttatgtccacctatgtttctcacacttagagggaaaaagcaagtcttctgttataaaggtttccaaatgcataagcttagataattatttttcttgagtctaaaacttgtttttttacagataaattattatacaaaagagttgaggtttataattgaagaacaagataggtttcaattcaattcaagagaaattttgttattttatttaggcttagattgttatgtgtgtgtgaatatatttatataaaaaaacttgaaaatattataaaatataccatctaaaacacacacaaaaattgtaatcacgatgtctaaatgactctttatttttaaaaaaagtatccaggagtccagagttttcctttttttttttttttggtaaggagtcagataccaaataatttaggccttttagaaaatatgctctttcttatgactgcttagctctactgttgcagtttaaaagtagttaaaactattggcaaatagaaggagtcaactatgtttcaatgaatgcatttagagaaacagacagcaagacagatttgcctggtgagtactattttgctgacctgtgctctaggattagaaatattttcttttataggatgaaaaaaccgagcatcatataaataaaataaaatgcttaatgcatacaactagctaagtaatgggaggctatgtcaaatcagtacagatgatctctagcacattatagagtattaaaactcatttttcttttcactgctccatatctgtgttaaattttatgatgaataacctaacttacattaagatgtgcaaatattttcttccatcgtgtagctatacttctggcccttggactttttatctgcaggattaaagactagagactagaaaatgctgcataaaacagaaggtttctcttttcttttattgtgagccatataaccttaaatggaatgtgaagaactctaaggtgtttcataaaagcaaatatattttataagagatatggaaaatatgatatacagaaagttctaagaatcgggacagttttgtctagaggaaaaagggcttacactgatttaattgcaatcttcagcatatgaaaatatgttcttattagaatagattctagatttctttacgtagtagaaattttcaaaaatggattttgaaagtttcaactagcaatcactgtctccttttaaatatgggtttttaagaaaatcattatattttatttttttcatcaaattttaagagaataatattagtatatattagacataatacaaaactggaaaaaatgcggtatagttctgattttatatctaactagaaatgaaaattgtgcaagctaattcattggtgtattgtttcttattcagaaaacagcatctgtgagccaggttttctcgttgaatctaaaatataattgtttcaaaaacttctcagctaaatacagcaagaaaatatatgtcttcactaacacacacagacacacacatacatacacacacagttcaataaattctctgtaaccatattcatttataaaaagctaaaaagctaaatatgagttcatactgatgccttcacctcaaatccattaccatattgactattctggacaacttctttgctcgtatttgtaatatatgttcttagtccaatagtaagaaccctggctcccacatctgccatccattaattcaattgttcagttccagtatatatgtttattgatgtaagaatttttaacccatacctctattggaaaaatgttatcaactagagaacagtacatatgtattacaaactaaaattcatttccaaagttgcgtaagatggcaacttttccctccactcccttcactgaggttgtttaatacatttgaagtgcagttatattctcttgtcacaatctgcattccttccaagatcccatgtttttccaattatttttaaatgttgcatagattattgtttactctttttgctatagttttgtaagttttgacaaatacaaaacttcttatatgcaatattaaagaattatacagattattttaactgctttcaaaatctcttgcacgtcatctattcagccttcctccctttctcctgaatgtatgccaaccactgttacttctaccgtttctgtatttttttccttttctagaacactatataattggaggtgtatagtgtgtagcatttacacactggctttcttctcatagcaaatatccgttggtttcactcattcttttcttggtttaatagctcatttattttttccctgaaaaaccttccattgaatgaatggattgaccacagttggtttattcattaatctactgaaagacatttcagcaaattcgaattttggactcttataaataaagctgctatatgctttcatataaagtgtctttatttgcttgtttttgctttgatatttcttggttttgtagatgtaggcttgcaaattaataaatacctggaagtgtaatttttggatattatagtaaaactatatttggtttttgtcttagttcattttctgttgctataacaaaatatcatggcctgggtaatttgaaaataaaacaaatttactttctaaacgtttggaagctgggaagtccaagaacatggtgctagcatctgctgagagccttcttactttgttatagtgtggcaaaaatgcaagcgagcatgcaagagagaaagattaaattgggccaaattcctctttctcatgagccctctttattatgagctcactcccacaataactaacccactcctaagatggcagcattaatgtattcatgagatagaagccttcacaatctaacgacttcttaaaggctccacctcttcatgctgttacgttggcagttacattttaatatgagttttggaagagacattcaaatcatagtatctttgtaagaaactgccactctcttctaaattgactgtacatttcactttcccaccatcaaggaatggaagttcatgtcactctacatccttgacagcagttaatatggtcagttctttggattttagctaatctaatatgtgtgcagtaatatgttaatgctgtgttacattgcaatgctttgttgacaagtgatattaaacgtattttcatatgcttattttcaatctggatttttttttctggttaagtgtgtgttcatatcttttgcccatagtgtaattgtgttgtttgattctttattactgagctttcagagttctttgaatatttttgatatatatttttatcttttatgttttgcaaatgtttccccttagtctgtgatttgtcttatcattttctttacagtttcctatgcagagaggcagagagtaaacttttcattttaatagtgcaatttacaatttttagtttcatgggatagagtgtttgctgttatatctagaaattcattacaaagcccaaggtcacctagagcttctcctagattttcttacagaagtttgatacttttgcattttgcatttaggtctgagatcaacctcactttaatttttataagaggtaaattctatgtctggattcatttatttctgcatatgaatgtataatcattttagcatcatttttgtaaagattattttttctccaatgaattggatttgttcattttccaacatttacccaaatatatttctgtggccatatgttttagttttatgttctgtttcattgttctaggtgtgtattatattataccacactgtcttaattattttcatgcattgttattagatacatgtatctttaagattattatgtcttcttggagatttgaccttactatctttatgtaatgaatgtctttatccttgataccttgccttattctgaagtcttctttgtctaaaattaacatatttatgctacattttattagcattagcattatatatctttctccatcaattttatgtttagtctaatggtatctctatatcgaaagattttttgtagatatcatatagttggatcttgtttaatatctttttaaattaaaaaataatatatgatgtttagatggtatttagaccactcatattctaaaatctgccccagttgtagctgttttctatttgctgcacttgttgttgtcttccacccccaactctgccttttaactcctttctggcttaatagagcatcttttttaagatcccattttctcttgtctcagtatatttcacttcttttgtaaaagaaatatatttgtcctagagtttgcaatacaattttacaaccaatataagtccactctgaaatagtactgtatcacttcatggttttgcatgtaccttaaaacacagcattctcaagtcttctcttctgtgtctggtaatattgttgccattcatttcacttagacaaacaatatagttacccaatacaatgcttgttattattttaaactagtgttatcaattagattagatgaaataaaagtaataattttcttttgccttaatctattccttctcttattactttatatagattcaagtttttcatctatatcatttttttctctctgaaatactgtttttaacttttctttcaggatagctgtgtcaacaaatttgcttggatttttgtttgaaaaacctttatttctctttcatttttgaagggcatttttcctggttgtgttttctttacttttcttccatactctctttgttgcatgtttttttaaatgaaaaatctgtttctttattttacttgttcctcaatattttatctttttcttttatttttggagctgcaatataatatcctggtgtagattttacagtattttttctgcttggtgctctgagagcttcctgtttgctgccagccattaatttttggaaatttctggccatgatgattttaaataattcttgtgctccatctttccctctccttctgatataccagttgtacaaacgctgccccccttttttttagaattttctcacagttcttggatttttttctctttgcatttaaatttgagaaatttctattgacatatattcaagttcagaaaagtttttctttgtagtgtcaagtttactaatgacttaccaaaggcattcttcatttctgttacaatgttattgatatcaaccattttctcaatatttccttagtgttcccatttctctgcatatgttatccatcaaatcttgcacactgtaaccttttttaattagagaccttaacatattagtcatagttattttaaattttctgacgtaattctaaatattgtcatatcttcatttctaatgttggacttagtgtgtatgtgtgtatatatatatatatactatatatgtatatatatatatcttttgtaagttatgtatgatgttttatgtaataggactgagataagtaggccttttgttgttttaggttattctggctagaagttgttctgggtttaatgcttactgtatctgtgtccttgttttttcactcctctgttgcttccctaaaaactccttctacaataaaatcctgcacctcttttacgtgtaatccaatattgaaatcttgttgatgtggtgttaagatgtaagggaggtcaagtgttctataactttataattacatctccgtcttttaagggtctgtgttcctggtctatggttttaaatacgctttttatcaacctttaagtaggaaaagaaatctagtgagaataggagttggtaattgcctgctcactaagtgagataaggctctgataaagtattttccccgatgggtactcatttgttaagaacattttggttgtatttctaaatggtcacttccctacactcctgccagagaccatgaggggatttttcttgacaattcattgtagggatgagaggagagtttccaaacaccttacatttcacaagtaaactcagaagccacttgctttcaaatagcaccaaaatatataaattaaaatatttcaaatcttatagactatttactggatcctttttcaaacagttattacttctcatttagaaaactctccttttcctggttttacttgacaacacacaatctaaatgcatttttttcacctatggatagtgattcaccctttccatgtcattaatgtttaggtgttcccaaaatactttgtaaatattgtttcttacatttttactcttttccacagatattctatatactcccatagctccagttcataatttgtcgattatttttacctttatatttccaataatgtcttctcgcttactattgagtactatactcaaattagtaaactaatactcatcctgtgaaaaacgccaccttcttgcaaacaccaacaaacttgctgtctttattgaatatctccacctttgacaatgacacagtggtgcatatacatatcattttataaatattcacaatattcatggatacccccttccctgcaattcactcctatgatcctcaaatgttattgggattcaaataaaaagccctatttttatagtcataatatatactaattaattataggtgaaaatataggaacaatcttcttttaaaaaaatgcatatttacttttcctccattttattatttggatgagtgggagtttatcagtgttaatatattaaatatgaatttctcattgattatctgagtatacacaaaggcaggtgtaattatttaatattttccacgctgctttaggacattaaatttaaaataatttcattattttatttatgcatgtaaatatatatgtgtgtgtgtattacacataccatcatatgcctaatgaagatgatttaaaatttgctaaatgctgcatattgtgtaataagtgtggtaggaaacaatatttatagttttacaacatgaacagttataaaataaagcaattgatctccctggtataaaagcttacttttagatgtaatttttaaaataattaaatgcaacatttcagtacctccttcaagaagaaattatgtaaacccatagaagaaaatttgatggtttataggcaggagaatgaagctgtatgacacctgataggtggtgttgaatcctattgatacatttagtaactgattctacagatcaataatggcaataatcatggtgatttactgtgaagggaatatattttggtggtatttaggccttgactgacaatatttaaaagacgaattgaataatctgccatgttaagcttctcatgaagactttaatgtatctttgatttgccataagaagagtgaattccttattgtttaaaagcattgtgttgaatcagaatattttattagatctgtgcagtgtttatatgttaaaaaagaaaactgaagttaaattgcctttcagtgaagattcctaatattgatcttgagtcctttttttttttttttttgagacggagtctcgctgtgtctcccgggctggagtgcagtggtgtgatctcagctcactgcaagctccgcctcctgggttcatgccattctcctgcctcagcctcccgagtaggtgagactacaggtgcccgtaaatcactactggcaaatcacttcactttatttattggagactccattctctcatctattagatagagattgtgctgcctacttaacagatttgctgagtccaaggggaaaatataactagcgaattatctaaaagattgatatcatattacaaataaacagctaaaagctgaccttgattcctggattattatttgaaatgactttaatcccattcccaataaaaaaatacagacctgtttacattattatgattgggatatgatcatgatttattagcttttatttcaatagaactgttgtaactttacttattctaacaagaacatttatgatgattagaaccttgatcttttctttatccagcctatcactgatgggcattgagcttggttccatgtctttgctatcatgaattgtgctgcaatgatcatatgcgtgcatgtgtctttataatagaatgacttatatttctctgggtatataccaagtaataggattgcctaatgaatggcatttctgtctttaagtctttgaggactagccacactgtcttccataatggatgaatgaatttacacttccacccaatagtgtataagggttctgttttctccacaacctcaccagtatctgttattttttgacttttgaagaatagccattctgactggtgttggatagtatctcattgtgattttgatttgcatttcactaataaaccgtagaatactatgcagccataaaaaagaaaaaaagaccatgttctttgcagggacatggatggagctggaggtcattatccttagcaaactaacacagaaacagaaaactaagaactgcattttctcacttatgagtgggacctaaatgatgagaacacacggacacatggaagggaacaacacacactggggctttttggagggtggagcatgagaggagggagaggattaggaaaaacaaataatagatacttggcttaatatctgggtggtgacataatctgtacaatacagccccactacatgaatttacctatgtaacaaacctgaacttgtacccctgaacttaaaagttaaaaaaaagaaccgtgaccttgccatcatcaataactgtaacttctttataatctccatttcatagataggactttctgtctatcagataaattgaaaggcataggtttgctatctactcaatctctctagtttcctgatttcaacaatctttgacccagaaaaacatctaatccattggttccatcatcttttgactgtcctgttccctctgaatattttctcaccatctgtttctcaatttgtttcatggtcaaacactataattaatctgttgcttacaactgcaaatcattttgcagtattaattctacaaaatcattatcaaaagccagttaaatctatcttatttctagtttatgtatacccctccccacaagaagctgaatgagaatggagcatgcactctaccctggcatttcaaatttttcttaacctattttcctttctttttttaaaaaaaattgtaatgcttacttttcactttataatattgtacataatatattctgtatattgctgatgacctatttattatgtatatttcaagaatgcaatatctcatggggtaagaatctttgttttttgttcattgatctattccaagatgcagtttctggtacctagtgggtcactcaatgtctaatgttgaaaaataaattatgtatttgatattttttcttattctacacattatcttggatattttagaatattgtttcacattagccacacagactacgaagactgatttattgtcctacagtttctctaagttttctgtgtataaagttctaagtcacattttcttcttatgcctactctttgttcatggtaggtatgtatatattactggggagaactcttgcagtattgctatatctgctctgacgaagtcttctcatttttagttctcccttacttctgggtcatatcgttttccagagaagcataattataaagtacagaaaaaataatttttagtatcataggaaagatgtgaactcatcatactgttaagttttatttttatgtaaatgcacttaatagaagttttttcagtgttaatctaagatttttttttaaataaactgtgtaacttacttctttttaactcttattcagtctttgcttgacataataaagacctaggttataaaaatattgaaagatacataggtgaggtatgacctaatattatttgcatctagatccatctctaaaattagagtcttttagtcttagactaaaaatcataatcagtgagtatatattcataactacaaagctctttataatattttgaatttgcccacataattatttcagaatatttttacagaattgctcaggggtttaagacaacttcagaaaaagtagcataagcagattaattgctccgagattttgtaattatatagaactgttcttaattagtggaaatcagtaagaagcctgtcctgagtaacagaatgtactgaatagcaatatcctttacttgtatccaccatgtctttttctactcctattttatgcataataaattagaagtgaattaaatgaagtgaaaactcgtttcttgatggagtagaatacttaacattcctatttttgtcttaaaattatgtaatttaaaaaagtattgacaagttagtaatgtcagtagaaaaatcagtctaagtacttttaagaaagtgattagttgctttactacttagtggttagatgcaggcttattcagaacaacttcacagactaaatctcttcctaaaatacgaagttctagggagtaggcaaatgtcagtgtcttgaacataaataggctaatataaaggactttcatatttgctaaactaattacttctgacttaatctatatctctcaaagttctgaacttcatagaaaaatagcaatatactcccaggttgaaatatcatgtttaattctgaaagtatttgctgcatatctttaagtacagagtcactgactgcactaattacctttctcagacagaaacagagatttctcagtagatgccagcaggaataggttctaataggttatgaatagaggattaaattgtagaagcacatagtccaccttcccattgccttccatgatttttgccacaacttaaaaataacatagaacttggagtgggtgccctaaaatgatcaatattttaattcttaactacataatacattgaagattcaaaagataaattaaattcaattactgaagaatataaaaacaataatgattgaatatctgaaattgcattgtaaaaatgcatacctttacaaaaatgttaggcattcctccagagtgaattcataaagaataggtgaagcaatggaaagagtatttgacagtttaacaaagattggaaatgtaaaatctgaaagacaattttaaaaagctaggcgtataaaaattaaggaaaagataagccaatgacagggaagagttcttgcaaaaaccctgaagtagaaatgagcttgatttattcaagagaataattgaacattagggcttttgaacataattatagaggagaaaaacgaagcggtggagaagtagggagtcattagcagatattaaaatctgaggttttctaaaatttagagatggtagcataggggaaaggaacttagaaaagctattgagatgaagcagccagtgaggatagaaaaaaaaagaggacattaagagatgatgtttcaagtaaaatgaaaatggtctcctctgtaatgtggctgaacattcaaatgagacaagataaacgaagtggtaactggaatatatatattcctccaacaaagctcattgtcaagtataagatttttaaaaatgaaggttgatcgagaagatttgaaagtttactatgaatgaaagaatattagagccaaataggtgccataaaaatagcttgagtgacagatctatactgcatagaaacatgaagtatagtttataagggaaaatagtccagataattaggtctatgatgaaacaagggggttggatgttgaaggacaactaaagctaagatgtttggtaggcagcaagtgtggacactgaggttagcttgagtaatggcagcagttttagtgaagagggttttaagtcaagtgtctagttgtccatggaagagagagtttggccagaagttagagaggggacaacaaacagaagattgtaggatggaagagaggttttgttaagttttataaaaagaagagtactagtatagaaattgcaatgtagaaagatggaagtatgctaccacttacgtgcttctgtgattgggagaaaaagagaatctttttttagagaaaccttcaaaaggagagttatttctggaactcttagattatagaataaactttataagtatgtggcatggaaaatgttactcatattagcacccactcctctttgtgtctgccttcctgctacactcacggtagggcaagaaataggggtaggctccaaggtggtttctagtcatttctctgtcctttaaattatccttcattcaagcataatatttgaaaaacatgtctataaaattactttgttttgttgcatgtatatgtgtgtttctgtgtaatcatgccatttattttaattataaaaatattcacgttttcaataacagaattcttgaattatatgtttgttgtggtgagaaatgtttgttagaattcagaatgctaaaaatatttatagtgacaattattctacaatttaaatttaaatagtatgaatttttctcttcaattaagtagtgtgcaataaaatttaacacatgcttagaaagcaattaccatcatataagaaggaatgggaatattttaattggtttgtgaattactttttctaaatagtacaatcatttttcttttgaaatgaggttaaaaaaccaaaatctaagctaactatatgtagttatgtcctagatatctttgtttaatgcattgttataattatgctgaataatcaaagaacaataggaaatttgaaagactgatgaatagaatactattttaagtcaaacaattattgacttatttgtattctttgtggtttcaccaaactaattttcaccttttacttacttgaactataatggggacacctaacttattttagctgtgtagattaattccatttaacactctttctcaaatacttgtagacttccatttttatctcataattattaccataattgaagataactcctataaattatttattgtggtgatctacagatatagtggggaaaatgtattacattgagcaatataatgtctataatatatgtaggataatttactacataagatttctaaatattactttctgttatgaacaaattattgttacgtaagacctgtcaggtcatttggggaatcacctagccatgcaggaccattacctacagtattattttccaggaaactgtgaatttctaaataattcaactgctaagtctcatatattttctaattcacaatatttagtaactagagaattgcatcatctacctataaaagaacaccagagacagaacacattctctttcttcttacacaaacatttccccagctttattgacatatagttgacaaggtatataatgtatacttgataaaattatataaatttgaggtgcacataatgattagatatacatatatattttgaaatgatgatcacaatcaattatttaacacatccatcacctcatatagttatctttattttttcttgggtgtggtgagattatttaagatccattctcttagcaaatttcaggtataaaatacagtattattaactataatacttggaaagcgactttatagcagagaaaaacattttatagtgatattgataaagcaaattatttaaaataagctaattttaccttcctctcctaaggtggcataggcgcacacaataaatgtagacattagcacacaattgttctggtgatatcctatttgggagagatttttaaggtcacaaagtctaacattgcagtgttttttgcatcttataaacatctcactccagccttagctgcaactcttctaaagactaaatgttctactcttaagagacaaggtcactggattcaatctacatattgttattgcatgtattttcttcctccattgaatcatgccaaatatttctaattttctaaataattatatttaaaaagtcatagacttgtaagtgctttcttcctctagccatcgtactaccatctcctctaccatttcctaaattttatggctctaattgtttacatcacccttaaaccaattttccagctgaaaataatcagcacagaaaatagttcagttattatctgtctcccttcttaacaatatatggttttccgcacaattttccattgttagactcttagaatattatttcattttctaggcaccctaaattaagacagctaatattatattactgtcatgcaatctagtttctagatttaatcatttgagggggaatgagttgggtttctttttccatgtccaccttctccgtggttccaggtaattgctaccatacaattgacattggttcagtgatctcatctacaagttctttcagtgcattaggggcaaatattttgtcctttgccttgaactgatttagaaagctagttgctcttggctgggcatggcggctcacacctgtcattccagcactttggaaggccgaggtggaaggatcacttgaggtcaggaatttgagaccagcctggccaacatggtgaaaacctgtctctactgaagatacaaaacttagctgggcatggtggcgggcgcctgtaatcccagctaagtaggaggctgatgcatgagaatctcttgacctctggatggggaggttgcagtgagctgagattgcgtcacagcactccagcctgagtgacagagcgactccatctcaaacccttaaagttgctcaattgctttgtttgtttgtttgtttttcatagagatttggtttcaccatgtgcaggctggtttcgaactcctgagcgcaagcaatccactggcctcgtcctcccaaagtgctgggattataggagtgagccaccacgcctggcctctcaattgctttgaataagtgttttcttatcaatactgttctactactttttatttggatataattgatagaaacaaattatacctaaataaaaagtggagggaaatagacttgacagatttatagatttattgctgttttagtctttaacatcttaccatgtattacaagcaacagatttaggactgtagtgttctttcttttttcctccaaatagagtcaagaaaatcttctcctatcctttgaatttttgcaagtagtaatttaatctgggtttctattctctgaacactattcttaggagtttatagcattcttgttcaatgtaactgtgccctctttgttcttctttgttgtttttccagagcctcatgttatacataataatatatttaagtaatccatcttttcttcctcattttccaatttgaaattgcattattacattatcagaatatcattttaaggagctttataattttttatgtgatcttctctttaaacctagattttacttttagaaccatattttctctgaaagttctgaagactgtcatttcttataatttcctgtcttgggtattaatagtagtaaatcattgtagatttgttttagtatctattagaagccagttgctaattgacagtaaatagtaaatgttgtgcccatatagtaattattaccttctttattgtttcaacttttatttttatttttatttttattttttgagacggagtctcgctctgtcacccgggctggagtgctgtggtgcgatctctgctcactgcaacctctgcctcctgagttccagcaatttccgtgcctcagcctccggagtcgctggaattacaggcgccggccaccatgtctggctaatttttgtatttttagtagagagtgggtttcactatgttggccaggttggtctcgagctcctgaactcagtgatctgcgcacctcggcctcccaaagtgctgggattacaggcatgagcccctgtccccggcccaatccgcctaaaatctcttagttcattcttatgttttctattttttcttatttaattaatttacatattcttattcgattttatctggcaaataaattccttatctaaagttcatttggctttaactgtattagttttgatactgattctcgctaaatgtgtctagtttccttttgtgttacagattttttaattgtgagctcctttactgcagtctttttctatacgtaattaatagaaatttatttcacgtttcttcagacagaattttttttttcctttgagacaccaaatttctatcaaaatggtaccactttatgtcaatgtctggtcttggggttttctaaaacaaatacaccacagaaatttgaggctgaaatttaagtgagagtttgatattctcagtggccaatacttctttcaaaattcaacatagggactgacacactttttttttttttttgagaaggagtctctctctctgttgcccaggctggagtgcagtggcagtgatctcggctcactgcaagctccacctcccgggttcacggcattctcctgcctcagcctccccagtagctgggactacaggtgcccgccaccacgccaagctaattttttgtatttttagtagagatggggtttcactgtgttagccaggatggtcttgatctcctgacctcgtgatccacccacctccgcctcccaaagtgctgggattacaggcattagccaccgcattttccttatgaatagattactttttcgtagtatatatacccttttactaaaagagtaaccattccagtatgatagcgttatcttagaagtatctaatatccagatccccccacccccgcccattgcatggaaaccactctttgtccttttatcctgtctttgtgacacacttaagaactcaaggctctttgaaaaacagtttttcaacacttaagatggctaaacacagttataatatgatcaggcaattccatttctagatatatacccaagggaaaattaaaacatatgtccacacaaaaatttaagtgttcctagcagcattattcataataggtcacattcacatcaactgatgtgtaaacaaaatgtagtttatccatacaatagtatattatttgaaatgaaataaagtattgatacatgctacaatgtgataaatcttgtaaacattatgataagtgaaagaagcctgttcacaatggccacatactgtacagttcccatttatacaatatgaaatgtccaaattaggcaaatctgtagaagcggaaagtagattagtggttgctatgacttgaggttgagagaagggacagttgaggtgagggctgaaggataaacgggttatgtgggtgtaaatgaaaatattctaaaactgattgtggcgatagttgtaccattccgttaacattctaaaagtcattggatcgcacactttaaatgggtggattctatggtaagtgaattatatttcaataaagctgttaaaaacgttatctactttcatattatttttaagagatattctcttctctgaaataattcagtttagcaaatttattctcaaaaatttacaaatgttggattaaaacagaactactatatatttaaataagctccaccctttctataacaaatgaatagctagatagattgatagatgaaagacagataggtagatagggagatagataagatagatagatagctataaagagatatagaccaaaacaaatgaagagatgaagttgtgtctaatggcttagggcttaatgcaacttccagtattcatgctctgataagtgaatgctaaatcttgtagctggaaaaatgagaatgtaaaatagatacaaaaacacaatagaagcaaaatataactcaatatgccaatcactttgtgagttggaggtgttgcttggacattaaatgaagattttcatcaggcacttagaaatatgatatatagaaaagaggtcaaaacaagaagcagttcaagggaatttgtgctttccaagtgtcacataatgtcatcatatactacatagtaaaatattattggccaggcacggtggctcatgtctgtaatcccagcactttgggaggcccaggcgggcagatcacgaggtcaggagatcgagatcatcctggctaacacggtggaaccccgtctctacaaaaaatacaaaaaattagccgggtgtggtggcaggcgcctgtagtcccagctactagggaggctgaggcaggagaatggcctgaacgagggaggcggagcttgcagtgagctgagatcacgccactgcactccagcctgggcagagcgagactccgtctcaaaaaaaaaaaaaaaaaaaaaattgcattttagtttgtgcttgatttcaatttgatgaaaactaatttaatagtttatagtaagttaatagtaatagtaaatgtaatataagaaatactctatcaaagattcaggcttatttatctaaaaataaattcagaagcattgcttagaaaaatcaggtggtttatggtgtagtctccataatgagtccaacaaatggtgctatttattagaacatactgttattcaatgttattcagcacctctgtggcccactgagatctactacatggcttacagtaaaactcatgatcgaaactttgtgctttgcttcttattctccaactcttcatatctaatggcagtaaattatatttaaaaattgtttttataatgaatttagtatctgtatagccatatatttttcaaaatataatggtagactcatcttttgtttttatttcttggaatctataatgaggcatcaacaaacatacctgacaagaaatacaggtttgcgcaaaacaaattccatcacaagaatgaataaaattctcattagaaaagttaaaggatccctaggcctgctgactgaaacacactaacaaagacaaacgtaaacaaagaacgggcagtgagaaatttggcgatttagtcaccaaatacagaaaaaaataagataaacatgggcaactgttttcagcagtcgtctgtggtaggttacatcattgtggagcagatattcactccctttccttcctacatggggggagtgttctttcccatcccttcttttgtcctggacattttccatgagaagagcatgtctttggcagccatccccttgtcagattgagttctgattgggaagactggtggaatcgagctgaatccagtctgcaacctggaggaaaatcattagggtcatctgcaggtatgatactgaaaaataaattttaatcagtatatattacagaaattttagcttaccttttgtagcactgctgcagctaaagataactaattcaacgtctaaaactatggctaagacactagaagagataacatcttaactaaaagagctaaaatattctgctcttattggcaattgcttattttatgcaaagatggatacatcaaatcatcttatcttaatatcagaaaatatttaataattttctttgttctagtcacgtttttaaggagtctactgatataacgtggctactcatgtggtggaaaacaatggtaaatgtgttatcctaaaatcaaaatatacactgttacctgcaaattttttttttttaatttggaaggaataaaaaaaaattcagtctcatattcttggcaaaattttctgctcaacatgtgaatttattcttaacttgaagaccatatcagatttcagggcgtgcaggactgaaaatcaaacttgagaatgtgttaagttttccaaggcaactaatgatcaactgtacttgattccagttttagctatgggccaagagaaaatagcttatttttctataccatagaagcataaattattatagaaaacaactctgtaaattgagaaattctgatatgtcagtgaagtgttaaatgttgtatatatattattactagtattttcttattttcgatctacaaatatgtaaatttttgtttaataacgttttaaaaaggtttgattcactaatcaaatttatgacttaatctgaaccagggcatgtaaacaaataaacaaaaagggtagttggaaggagccttacaaaagatttggataaaagaaaatatctctgcagaatttcatttgctgttctgctaaatttaaggccatctgtgtgtctctgtgtgtgtgtgtgtgtgtgtgtgtgtgtgtgtgtgtgtgtgtgtagtttcctcaaaatttgacagaaggcccaatgtaatcttataaattaagagctgtacaatattgagctcaacaaagtggctattgtgagcctgaacagaagctctgtatttttgaatctgtggtttttttttaacactcaattttggtttgggttttgggggataagaaaatcataggaactagtcctctatttttcttgtttcgcaaaacaggactgcctgacatctacctacctgcaattggcttcttcttcaagtctccacggtcttgtccagaaccacattatgacatcctcatttgaaaaagggtttgggtgtagaatagaatccatgatcaatcatgctctattctaaattgctatatattcaaaataatgttatatctaaatgtggatttatttgattattttattctcataggtccattatctcagatttggctacaatattttgagaatgagaaagagactttcagatcaggaatatccagaaaaataaatgagtttatgagaatcatttttcagtggtctctgcgaaattaagagtctgcctacaattatttaagagagaaaataaagtgcgttaaataaattagtgaacacacaatttatgtcaaattcttccaaagctctcaaaagtttagatctttacacaattttgaacattggctataaacaatatcattcaggactggttaaatctatgtaagactaaggtaggatctgttatcaacaaatatattgtatatcagctctaatttagtgaattttgttcaaggatgaaattaaatacaatgattaaataattaaaataaagataataagcaatctgttatgggttattcaatatatatgttattaatgtgaagactgacttttgttttataatttttatagaaaatttgttttaaaggagattatataaacatagtagatgatgttttatgagagacatggtgttatgttttgtggtcatgtcattgaactataattgaatacattacattttttaaaatttttcatttttgagggtatataatatacataagttgtggggcatgtaaattattttgattcaggcatacaatgcataacaatcatagcaaggtaaatgggttatctatcacctcaaatatttatccttttaaagtgttccaaacaatacaattatacattttagttactttgaaatgcacaataaattattgttgactataatcacatgtggtgttatcaaatacttattaattctagctatgtatttgtacccattacccattcctattatccctgacccttcccagcctctgctaaccgtcaacaaagtaaagctataccccccaaaatgggagaaaattttcgcaaaatatcatctgttgagggattaataagaatatttaaggatctcagagaactctataggaaaaaaaaccaataatccagataattctgaaaataagtcatacaaatgccaaataggtatacaaaaaggtactcaacatcattgatagttagaaaatgcacatcaaaaccgcagaaaggtcgggcgcagtggctcatgcctgtaatcccagcagtttgggaggccgaggcgggtggatcatgaggtcaggagatcgagaccatcctggctaacatggtgaaaccccatctctactaaaaatatattttaaaaaattagctgggcgtggtagcgggagcctgtagtcccagctactcgggaggctgaggcaggagaatggcgtgaacccaggaggcagagcttgcagtgagtcgagatcgcgccactgcactccagcctgggcaatagagcgagacttcgtttccaaaaaaaaaaaaaaactacagcaagatattatctcattccagttaaaattacttttgtccaaaagacaggcattaacaaatgctgacaaggatgtggagaaaagggaagccttctatacagttgtaagaatgtaaattagtacaacaactaagaagaacagtttggaggctcctcaaataagtaagaataggtctatcatatgatccaacaatcctactactaggaatatacacaaaagaaaagaaattaatatatcaaagagatttctgcactcccatgtctattgcagcactattcattcacaagagtcaagatttggaagtaacctaagtgtcagtcgacagaatggataaagataatggagtacatacacacgatggagtactattcagccattaaaaatgagatcttgttatttgcaacaatatggatgacaaacacaaactttacatgttctcattcatttgtaggagctaaaatttaaaacaattgaataaattacttattataatggaataaaaacattaatataaaactttaaaaaaatgagttaacataataattgtacatctttatgaggtaatataagtttacatgtatatattgtgtagtcatcaaaccatggtaattagcatatccatcaccttcaacaattattgtgcctttgttggcttctcagcctattgactaagaacaagtggccagttgcagtggctcatgcctgtaatcccagcactttaggaagcctaggcaggcagatcacgaggtcaggagatcgagaccatcctggctaacatggtgaaacctcgtccctactaaaaatacaaaaaaaaattagctgggcgtggtggcgggcacctgtagtcccatctacttgggaggctgaggcaggagaattgcttgaaccagggaggcagagcttgcagtgagtggagatcacaccactgcactccagcctgggggacagagcgagactctgtctcaaaaaaaataaaaaaataaaaataataataataaaaagaacaagtgtagtatctgttattagtttaatacaaaactctttaaatataaaattgtagaattattaaaattttatatagcagacatttttgcttgtggagggtgtttggttgacaaagatgacctgcaaactaattgttagctctgttcttgtaaagtatttgcattgctttttctacttctaaaagaggcaaatatttatgctttctcataattcatggtaagtgggtctttctgctctttcccaaatcatcagtgatgacacagaaaataatcacatcacccccatactgtccatcagcttttgaaaatttggcatacctaaattttatttattgaaaatatagatttagcaattattataatgtctagctttacatagtaagccttttccagattttgttatatttaacattataattttaacgtctaaataagattttactaattttatgttcttgtttctatattcttatattttaaaaagagtagtaatgtacaaatttgaactaatttttttttttgcactttatttaggataaatctgtaggagaagttgtatttggtttaaagtatgaacacagttatagctcatttttaaataactttttttagtcagatgggaatatatccatttacattactatgtgcagttttagatgtatttggaaaataccaaacactgaaatagacagttctaattttccctgtatgacattttttctaaataaaagtgtgtatgaaaattggttttaatatcaatttaaatatcattctaaattgctgagtggaccaagtgaatcatttagaatggaaataatcctaaattcttaagatatgctgcatattttcttttttcttcatagatttgctgtttgcaagttaaagttaaataaaagataaaatcatgtcgagggagtttaggcatgaacaaattataactaagtgtatttataatatttcaccttttcccagaggtggtcggagcaaatgaggaatggtttctaattaattgggttgtggatttatctatttacaaataggaatttaagctaatacttaacgctgcaggtgcagtagcataattgtaacactcagccaaatgatcacttggacaaaagaaggacagctttgaccatcagtttctgcagctgatagagtagagccctgccatttaatccccagctgggcttattatagaaaaatcacagcaatgattttgttagtcttctattaagagagtgtttatggttcaaataatttgcagaatgtaatacatgtgcttgaaacttgctaaagaattggttagcactttttggggtggatttctatgttaaaatttgaagggatttggcctgcagtatatcaggcatatacttatgtgacaaatgctgcatccttcatgaggcatgtaagtaattggagtaatatgacaattttggggtttttaaaaaattcatcaaaatagtcttagccagagcaatcagacaagagaaagaaataaagggcatccaaatcagtaaacaagaagtaaaactgtcactgtttgctgatgacctgattatataaccagaaaatcctagactcatccaaaaaagatcctagaactgataaatgagttcagtaaagtttcaggatacaaataacatacacaaatcagtagtgctataccccaacagcgaacacgctaaggaccaactcaagaacccaacccattttacaatagctgcaaaaataaaaaataaaatacttaggaatatacttaactaaggaagtgaaagacctcttcaaggaagactcccaaatgctgctgaaagaaatcatagatgacacaaacaaatggaaacacatcccatgctcagggatcatagcattttcacaatctgtattgtgaaaatgacgatactgccaaaggcaatctacaaattcagtgcaattcccatccaaataccaaaatcattgttcaaagaactagaaaaaacaatcctaaaattcatatgaaaccattaaagagcctgcatagccaaagcaagactaaatgacacaaacaaatggaaacacatcccatgctcagggatcatcgcattttcacaatctgtattgtgaaaatgaccatactgccaaaggcaatctacaaattcagtgcaattcccatccaaataccaaaatcattgttcaaagaactagaaaaaacaatcctaaaattcatatgaaaccattaaagagcctgcatagccaaagcaagactagcaaagagagcaaatctggaggcgttgcattacctgatttcaaactctactgtaaggccatagtcatcaaagcagcatggtactggtacaaaaataggcatatggaccaatggaacagaatagagaacccagaagtaaagccaaatacttagagacaattgatcttcaacaaagcaaacaaaaacatcaagtcggggaaaaacaccctttttgacaaatggtgcagggataattagcaaaccacatgtagaagaatgaaacaggatcgacgtctctcaccttatacaaaaatcaactgaagatgcatcacagactttaaaaactgaaaccataacaattctagaagtaaacattgaaaaaaaaacccttctagacatttgcttaggcaaagacttcatgacaaagaatgcaaaagcaggctggccacagtggctcatgcttgtaatcccagcactttgggaaaccaaggtgggcagatcacctaagatcagaagtttgagaccagtctgactaatatggtgaaaccatgtctgtactaaaaatacaaaagttagccaggctgtggtggcatgtgcctataatcccagctactcagaaggctgaggcgagagaatcacttgaacccaggaggtggaggatgcagtgagccaagattgtgccactgcactccagcctgggtgacagagggagatcctttctctaaataaataaataaaacccaaaagcaaatgcaacaaaaacaaagataaatagatgggacttaattaaactaaaaagcttttgtacagcaaaataaataatcagcagagaaaacagacattccacagagtaggagaaaatctttgtaatctatacattggacaaataactaatatgcagaatctacaaggaactcaaacaaatcagcaaggacaaaacaaacaaacccatcaaagttgggctatgtatctcttccttacgccttatataaaaattaactcaagttggattaaagactaaaacgtaagacctaaaaccataaaagccctagaagaaaaactaggcaataccatccaggacatagggatgggcaaagacttcatgactaaaacaccaaaagcagtggcaacaaaagtcaaaatagacaaatgggatctaattaaactaaagagcttctgcacagcaaaagaaaatatcagaattaacaggcaacctacagaatgggagaaaatttttgcaattgatccatctgacaaaaggctactatccagaatttacaaagaacttaaacacatttacaagaaaaaaaacaaccccatcaaaaaatgagcaaaggatatgaagagaacttctcaaaagaagacatttatgcagctaacaaacttatgaaaacatgctcatcctcactggtcactagagaaatgcaaatcaaaaccacattgagataccatctcatgccagttagaatggtgatctttagaaaggaaacaacagatgctggagaggatgtggagaaataggaacagttttacactgttggtgggcgtgtaaattagtccaattattgtggaagacagtgtggcgattcctcaaagatctagaaccagaattaccatttgacccagcaatcccattactgggtatacacccaaaggattataagtcattctactataaagacacatgcacaggtatgtttattaaagcactgttcactatagcagtcttggaaccatcccaaatgcccatcaatggtagactggataatggaaatgtggcacatatacaccatggaatactatgcagccataaaaaagggtgagttcatgtcctttacagggccatggatgaaactggaaactgtcattctcagcaaagtaacactagaagagaaaaccaaacaccgcatattctcactcataagtgggagttgaacaatgagaacacatggacacagggagaggaacatcacacactggggcctgtcggggggtggggggctgggggaggatagcattagaagaaatacctaatgtaaatgatgaattgatgggtgtatcaaaccaacatggcacatgtatacctatgtaacctgcacattgtgcacatgtacacctatgtaacctgcacattgtgcacatgtaccctagaacttaaagtataataaaaaaaagttttggctagggacatgaatagacaattctcaaaagaagatgtaaaatggctaacaaacatatttttaaaaagtccagcatcactaattatcagggaaatgcaaatcaaacccacaatgtgataccacctcactccttcaagaatggccataatcaaaaaatcaaaaaagaatagatgttgtcttagatgtggtgaaaaggaaacactttcacactgttggtgggaatgtaaactagtacaaccactatggaaaacactgtggccatttcttaaagaactgaaagtagatctaccatttgatatagcagtctcactcctgggtatctacccagaggaaaagtcattatacgaaaaagatatttgcccaggcatgtttatagcagtacatttctcagttgtaaaaatatggaaccatcccaaatgcccatcattcaacgagtagataaagaaaatgtggtatacgtgtgtgtgtgtgtgtgtgtgtgtgtgtgtacatatgtatctcagatgtatgagaaattattcctttatcttaacaaaaattattgtgtattatttgtatgtgcagttttcaactaatgagaaacaattctgtataaaggaaaaaatgtgacacttggatgtagaaaacttgcttttattcaccttcagttttaccacttaagaaactgttgtaaactgattcatgtttcttgaatgaaactccaacattcaaagaaatttttgactgaagcttctaaaataataaatacttttgtgaaataacattaaaaagttggtttcatttcatgtctttttatgttttcagagatcatgagactgaagtatttttttatttttctaatgttacttttaattgacaaataataattgtacatattcatgggatacataatgatgtttcaatccaaataatgtatagtgatcaggtcaggataattagcctatctgtctttcaaatacttatcagttcctcatgttgggaacattcaatatccctctagctatttgggactgcataatatattactgttaactgtagtcatcctatagtggtttaaacattagctatcattcttcctatgttgctataattttaggtcttataacaaatttctccctatccttgccttctccctaccctttccacctccagtatcctctgttctaatggtcacttctgtgagatcaaccatttttagcttccacatatgagtctgatcatgcagtgtttaattttctgttcctggcttatttcactagacataatgtcctccagttctatctatgtggctgcaaatttcagaatatcttctaaatataaaaattttatttaaaagtaatatgttttcctggcaaatcttttacacagaatttgagagttttttttgctgcacttttatgctgcaaattatgttcaatataatataatgaacttttatattttataattaattaattcaaaattgtcccatatctttgggtgatttttttggacaggtgcaatttttatgaataaaataaatggcatccaaacataagatgaatgttttaacaaatgtagtcatctatgtaactagctcttcagtcaccatatgacatgttctattacttcagaaagtttccttctgcaggcttaaaaccagctatcctataatcatcatatatactacattatcatctgtatcttttgtccgttcttcaacttcaaataaatagaatcatactatataaaccctttagttttggattctgttttggcatatgtttttgatgtgtatccattagtgtagtttgtttttttgctgagtaatacccccctgtgtaaatgtgtcacaatttagacatctagtcttccacttaagcatatttagattgtttccagttttcagcttttatgactaaatcttctaaaattgtttttccctaaatgtatattttaatttgtctcaggagtagaatttctgagtcataaagcggtcatatgtataaattttaggtgcctcatagctcttcaaatagtcatcccattttatacatccaggcaatatatgagagttcttggtgctccacatcttagctaggatttgatgtcaaccagtctctttaatttagatattctagtacatacaaaataatacctcagtgtaacctctgtttgtatttcccttgattaactgatgctgagcacatcttcatgtgcttattgaccattaattagtcttatttgttaaatgtctcaaatattttatacagttttacattgtgttattcattttttaaaaaattcattttaggttatatgtatgtgtgtgtcaaagtgtgtgtacatctatttgatatatgtatgtctatatattctggataccatctctgtttcatgcattgcatatatatttgcctatttagtggtttatcttttcattttcttttggtatcttttcattagaaatgttatttattttgagtaagtaacatttaatatattctgtaacatttaatgaatcattttatgttatgtttagtattaaatttctgaaaacattctatgtattctactagaattgtcataattttatcttttatatacattgatatttttatgtcaaatatgtaggtatgtgatattatgcacatggttttaattcagttaattgttcttccagatgtttgtaccattccaacatcatttaaatcattaaatgaaaagcctttccttactagctagccagctttgaaaatccattcatagggtttgtgttaatatatttttgttcttttttttcctttctactgatctctttatattaatacctactgtggctttatatgaagtcatggaataatacgtagtaagccctctaacactgttctgttactgttgttattgttttctcagggtactttgaaatattcgagattttattattttttagtagcctagatttcaagattgttttgacgatcaatttttgaatcaattgtcaatatttttagtaataaaatgatgatttttgattggaaatacattaaatctataagccaaattggagattattgatatattaacaaaaatgagttttccagtccatgaatgtatgcacattataaaattcattcttaagtatgtcattttttaagttttagtttcagcagtatatgtttgttacataggtaaactcctgtcatgggggttagttgtacaggttattttatcatccaggcataaagcccagtacccagtagttatcttttctgctcctctccctcctgtcaccctccactctcaagtagaccccagtttctgttgttctcttctttgcattaatgacttctcatcatttagattgcacttgtaagtgagaacaggacgtatgtggttttctactcctgtgttagtttgctaaggataaccacctccatctccatccatgttcccacaaaagacatgatctccttttttatggctgcatattattccatggtatatatgtaccacattttctttatccaatctgtcattgatggacatttaggttgtttccacatcattgccgttgtaaatactgctgcagtgaatattcgtgtgtatgtctttatggtagaatgatttatattcctctgggtatatttccaagtaatgggatggttgggtcaaatggtaattctgcttttagctttttgaggaattgccatattgcctttcacaacggttgaactaatttatactcccaagagtgtataagttgttcctttttctctgcaacctcgacatcacctgttatttatgacttttatataatagccattctgctggtctgagatggtatctcattatgattttgatttgcatttctctaatgctcagtgatattgagcttggctgcatatatgtcttcttttaaaaatatctgttcatgtcctttgcctaatttataacggggttgtttgtttttctcttgtaaatttgtttaagttccttatagattctaggtattaaaccttttttcagaggcgtggcttgcaaatattttctcccattctataggttgtctgtttattctgttgatagtttcccttgctgtgcagaagctcttaactttaattagatccgacttgtcaatttttgctttggtcgcaattgcttttgatgttattgtcgtgaaatctttgctagttcttaggtccaggatgatattgcccaagttgtcttccagggcttttataattttggattttacatttaagtcttaatatatttattaaatttgttagggtttcaggatacaaggacaatatagcagcaaacaatgtaaaagtaaaatctgaaaaataatagaaaacagtttaattgaacactttaccattatgtaatgcccttctttgtctttcctgatctttgttggtttgaagttcaaaaaagacaaacttaatggtacaataggtattgtagatttcaggactttctgtataaaatattttgtatatatgaatagatcattttttatttccagtctttaaacattttcttaacattttcttctattgcttcacttcactcgctaggaccatcaggacagtgttgaacagaaattgtcagactgatcatcacaactttttctagattttagaaggaaatttttctttatttcaacataaagcagcatgttaatgccaagttttaatatgtgttatcagattgaaatttttttgtatatttctacattaccaagaatttttagcaagagtttttgttgagttttaatttaaaaatcatttgttaatttcatctgatttttttatttctctttttaccttaagagattaaactgactacagattgaatataaacaaacaaacaaacaaacaaaaactctaaaatgctgtggatcaacaccacttagtaatttgtatacttggattcaatttgctgaaattttgttagacatttttgcgtcgatatttatgagggatgttgatctgtaaaagtattaaaatgcctttgacagattttgatagcagtgttattctggcctaataaatcaaactgaggtatgatccttccttttctatttcttaatagcatttttaaaattggtggttttttccttccttagtgaaatttaccagcaaagtaacaggccttatatttctcttgtggaaatattttaatttcaaattaatggtattttgttcttgtagggtggtaattttctctgtgtttggtcttaatggactcttagctgatcacccagttactcagcgaggtctcttcactctggaagagctggaactccagtgtgttttagtgcagcatgaccacgggtattaccgttcaacatttaggctttatcagtgataactatttgtcctcatggagtttttgccgctgggcctacacagtttaggcttcagcttagaacacataatgaattcttatgcagatttctgcccacctttgacctttcatgatttcctcttcttgggtaagctgccttattaatctgatacacttcagcagtccagaactacactctttcccttctctgctcttggagatgactcttttgtctgagattcactttgctgtgctgaaaaagaaaagtgcttcaaggaagataccaaggaaaatcacagggctcatttatgtatttctcttctttcaaggactacagctttgtgttgcctatgttcaatttctgaaaataattagagcatatatactctgtgtgagaaggcaaatccagacagttagtttgtatgactagaagcagaagtctacatggagaattttacttaactgtgttatagtttctttaattatttcaagagtatgtttaatgttccacagatctcattctataaatctttatcatcttagagctctgatactatttagaattactattccttcaaataagagattagaaacagggttatatttggggtaggttgacttacttttctgggaaccaaagcatattaaattgaccagttttaacacacttctatgtatgcacaaagatatatatttacattctgcaaaatcattctttcctttttgaatttgaaaaggatctttggtatacagatattcaatagccagcctgaagattcatttgaattcatttaatgtttagattcactacatgaaatgatccagaagagagtactcaaatataagtatctataacgatggaaatatacatctccactgcccaagatggtagtcatgagtcaatattgatcatgtgagacgtggcaagtgttactcagggtctcaatatttaaatgtattaagctttaattaatgtaaatttgaatttagcaaaacatgtatagcttgtggttactgttttattcagtgccaatatagaacatttccatgattacagaaagttatcttagaatactcagttctggactattttatctggctaaattaaatgttaaaatattacaaattcatcttcaggctggctgttgaatatttttatagcaaaagtcatttataaatttaaaactcaaataattatctttttcaatatgtaaaatatgtctttacatattctactcccttcttacatacatattctgatgtaacataggtattctcttattcatgcacactgaaatgacaacataaataattttactaagtgtcaccatataaaaaactttgaacaaaatcagattatatcactgtggatatttctattttgaactaacttagatgataattttaatctatatcctagatgaactttaaatcaataaaatctctcaatggtgttataaatctcaagccattagccactgattatcccatttttattcttttcatattaattttattgccatgtatgaatgctgtagcatccatgtttaaatactagataacaaaatgcactggcatcagatacaataaggatgaaatgagatataattaggactctggtaacacacataaaattggaaagataccctgaaattcaagccaagaagatatttatccagcttattttattttgagacagagtcttgctctctcactcaggctggagtgcagtggaccattctaggctcgctccaacctctgtctcccaaattgaagtaattctcgtgcctcaatctcccgagtagctgggattacaggcatgtgtcaccaagcctggctgatttttgtagttttagtagagacggggtttcaccatgatggccaggctggtcttgaactcctggcctcaagtgactggaacacctcggcctcctaaagtgctgggattacagacgagagccactgaacagctttgatccaacttatttggatgaatgagttacatattttacattaaatctgttattgtgataattcttcatgttattttccatgtatagatttatatataatgtaattttaattttttttcaccggagagtataaacaacaattattttataaacaggataataaaaataagacaaaaattgttgaaatgtcttcatttgactactaactttttacatgtttgttactttgaagctgttatcaatacttgtgatgtattacaattaagtaaagatttaaagatgccatttttaacttattatgacacaaagtctataaattcttatattttgagatttgtatttaaataacttgtgaaatttaattttaaaataaaatttcttctatggattggtcttcaatcgaggcataaaaaggaatataacagtgtggcactataacttctatattgaatttctatattatttaacacaattataattttgctaatgaattgtaatgtttttaaaaagctaggtgaattttattaaattcattacatggcgataacacagagaaaacattttggggattcttttaaaatggtatgtacaaaagcttaaaagttgttatgtagtggcagagataaaaaagtaaaacaaaaaaaagcttaaaagtttgctttactatttataggctcataagtgtaagtgtgccagaaaatgaaaaagaaaggagagaaattataaataactgtgtggaaaacacagataaagcataaagatagaatataaagatagaagcattttaatatgaggcagtgatggctttttgaagaatcccaactaaggacctacttttagttaataaataatatgtttctaatccctatattgtccacagcaacctttttaggacatggagcagtgactatgagtgccagaaggcaagagtagaagcaattgtaaaatcatgaacactagtttgtaaaatcctcactgagatataatatctgtttgcctctaccttagaattattaatgtcttgagggctgggactatgtctgtttccctcatacacagcactaatcctggatggtcagtctagatgcttaagaaatatctgttgaattgactgacctgaacaatggtaataaaaagtggcagaaagtttactgttagaatttaagtacaagactggtggtaacaaaatcaaaaacaaaaaccaacaaacaaaagctcaacaacagcagtagctaactcaacagaaacaattggacaaaagctgcaccactagttgtgataaaagaatcaagactgttagtgataatggcagattatcaccgcactgtgatactgttggctgcactgtgtattaaaacatccatagtaatttaatgtcagtggagtgagtggcaccagatgtgatcagtgcaaatggaggcattggccacagtacagttgcattaaaaataatctaaacaggaccagcatcaagggtcatataacagtgaagcactagactagaagagagggtattaaagactcaagtgatgttggattggagacatcctagatgtcatggtttaaaggcacaaggcaaattttgaagaaggaagtagtagggggaagacactgaatcagaagatatatttaggtaatattattaaatataaagttatatttataagatgtaatatgtaatatattatgtttatatattaaatcaatatatgatgcatattatatatattaacatttcatataatataatgtatatgtgatataacataaatatattataatatatgtatagtatatgtttgcctgtatcttagaattataaatttcctcccagcataagaaaataatttacagaaaagtctttgcattttccatacacattagagaagttgaactcccttagccagtgtgatgctaattaggttcccatagataatgcatatattctaaaattatgtttaagaaacatcttttggccagacgcagtggctcatgcctgtaatcccagcacttcgggaggccaaggcgggtggatcacctgaggtcgggagttcgagaccagcctgaccaacatggagaaaccccatctctactaaaaatacaaaattagctgggcgtggtggcacatgcctgtaatcccagctactcgggaggctgaggcaggagaatcgcttgaacccgggaggtggaggttgtggtgagccgagatggcagcattgtgctccagcctgggctacaaaagcaaaactccatctaaaaaaaaaaaaaaaaagaaacacctttcatttattccaagatgttgaaaagaaacttaagcctttctttgtgaattcatctatttgctcatgttatgtttgttattattttttaccgactttactttttagaggtgttttaggtcacagcaaaattgagagaaaggtacagagatttcttatataccgtctaaccccacctcccacacatatgcatagcctccactattatgcatatgcatcaccaaagtggcacattagctgcaattgataaacttacattgacacataatagttactacaagtccataatttacattagggttcactctttgtgttgtatatcatatgggtttggacaaatgtataatgatgtgcatgtaccattacagtctcagatactttcactgccctgaaagtcctctgtgctctgcctattcatttcttttccagtctaatccctggcaaccaccgatctttccactgtctctgtagttttgccttttccagaatgtgatatagttggaatcataacgtatacggccttttcagattatcttatttcacttagtaatatgcatttaagcttcctctgtgtctttcatggcttgatagttcatttgtttttagtgctgaatgatattttattgtctgaatataccacagttaacttatgtattcacctcctgaaggggatttggatatttttgattgatgcgtaagctgtacatatttggggggttacattgttaaatgtgtagaatatgttcaaaataataaggtcaatgccaataatattttgaggatctaagtaatgggatagacagaacatagcatcgtgtgtgtgtgtgtgcgcgtgtgtgtgtgcatgtatttatgtagcctaaaactagtagaatcgaggtcatgcaattattataagttatttgtagaaacgtgcaagtgataatgttaaaagttaaaattatctaaatatacatgtatatcatccatagagaagaatattaacatctccttttttgcaaagatcttacagttcaaaggtaccaccgttaagagtcttgaactattgctaccaccaaaattaattgcctattcatttctgttgcattaaatgtctcctgttaacattaacctgattctgtcaccaacattttacatatttatttaaatacacctgaggaaatatgctgaatgtaatttagggtcatgtggcataggatattcatttatttatttttcccccatagtaaatcctaaagaaataattactgggtgggttatgtttaaactaagtataataaatgtgcaaatttcaaatgttatgaaagctgaaagcaaagcttctatattgtggtaatagctctaatgtgccagaatgacacatggaatattgtgacagagtatagagctggcaggtaatacaatttctcaaagaatttaggttacaaagccctctgcaaatcacgtataagtacttagttcggaataatatttattctgaatcaatatttaagcgataaaataaaacattaatacacaaagagaggttaggtagtattttcacgtgaacagttaatgatcttggtaccctcatggcttggagaaacgtcaagccccagaaatgtaattatttaataatgacaaagaaacttttaaaaatatgttttattaaaaaaatcacaagttgagttacagaaagtttaatggataattagaccccataaccttttctgatatagcctaccttaggcatatactcaagtcttttggagaaaagattataaacaaaaaggcaagtaattttttcaacagttgctcttattttccaccaccctaagcccttggtctgcatggaaaggagctcatgtttagttgctgtttgctcttttcttggcttttcctagcaaaataagctgtaatttatgaaatcattataaagtaatacaaatctaagaaatcatgatagtttgatcagatcattagctgaagtatcagaagataatttatatccctgatatggcctcatatgcttaaaaagaagagaacctgaattatatgaatctggaggttaattattggtttctgggtgcatcacaaggaaagatttgctgagggtgagaggatattgagtagtgacactttgatagtgacactgtggatattcaacatgttcttcaatgttaagtagaaagtgtattttaacaacttaagggttttttgttaacttttattttagattaatttaagtgaatatccaaaaatgttatttcccaattcatcaacagtaacttaagtatttggtaaaaggaaataacagtagaaagatacttgaattggctatcagaagtcctaggtgcaagttagttggctcagctaactcatacacactttactgaattcacactcccaaagtgcctatatataatttcagtaactctaggtcttccgtggcttcatggtctgtggcaaaacaaaaattgcagggacaatataaatttggtaaatagtatgtgaaaggttatatagccccaaactagtttattaaactagtgtaaatcagaatagagaagaaatagaggatgagagaaagtgaagacaattcttgatttaaaatattatattaatcttacattagaaatttcccatcctccagattttcctccacagctgtactgcttatactcttaataggattcagaacagttttgtttgtttgttgtttgttttttattagggaatgtttaacccagatatgaactcaactcaccctatcatttgagattaaatggaatttggatttaactcccatcccacatgcattgggtcttatcaacaaatctttcaatcttgcaggagtctggggtatacttatatttcccctatttacctctgactttggattcaagaataaggagacatagagcttacttgaacttaacctatcagacacaacccacttagctcaacttacacgtagccctcaagtaacacattcaagtaatctgtgtttgttgtcattttctaagttttggtgccatttcttgccacagcaaaaagtaagagaaagtgaaacattaaaagcagtggaaatgcagaagtgcttctactggatatttgtctggaaatatgtataaataatcagaaaatctagatagggctaaacaattcatggataaaatccagagaaatatttgctttagtactcgggtgtgtgtgaacattaaaacctaaaatgaaagcagtcctccagttgagacaaacaacagcaacaacaaagaaaacccctctgagtacagagaggaagtttctagatctttcttctagacattgccttgcctactgagcatcatgacccaagccaatcagtgcacactgattggttaatgaaatacactcaataattttgtttgtaatctgagaagaataccatatacatataaaatgttataatctctcttttctattctgtgaaattgggataatattattagcctcatggcttttgtaatgatccaataagttaatattcctataacagaataaaatgttaaaacatttgtaattgcttttttttgaagcaaagtagaaccatcagttcctcactccccatctgcttctgcatctctttcatctcaactaatggctattccttcgttcaaatttctcatgccaaaatggtggctgtcatcctggactattttttttctagtccacctcttgtcacaagtctattgtcctaactccactttcaatatattctcagaatcacatcacttcttacaacttcatagccaccaatctgttctaagccactggcatccctcacctaggttaacaaaatagcctcctaactgttctccctactccttcctttaccctcctttgtctactctcaaggaaacaatcaaagtcactccagttcttttctggaaattttcctgccatcagtgtcctatctctttaagttaacagccagagttttgaccacgttctccatgttttgatctggcctctgtaacttgtctgacttcatttcctacttttcttcatctctttcactccactcactgccataggcttcactgcttcttaaacaagctaggcatgctctcagctgagagccctttgcaaacgctgttcactttgtctgaaaggctgttgccggcatatagtcccaagacctcttccctttctttattttcctccgaagtccccttcccagtgaggcctttctgaaacaccatacctaaaaattattcaccgcccacacacacatatgcatagactgcaagctcctttcagtttttatttttctactatgcacttatcactatctaccaaagaatatcagtgttcctcagagaaacataaccagtaagataaataggtagatagatgattgattgattgatagatggatagatagatagatgatagacagatgatagagaaagagataaatgttttaacgtctcctccatatctattatttattttaagaaattttctcacgtgattgtgagaggtggcaagtctgaaatccacagagcagactgagaggctgaaaactcagacaggaattgacgttgtaatcttgagtctgaaatgtaaagggcagtccggcaggctgtatgttcaatcatgatttcagttgattacaaggtaatcaactgattggatgagacccatgtaattttcttaaattcaactgattgtagatgttaatcacatctataaaataacttcacagaaaaaaaatcttaactagtgtttgagctaataactgggcaccatagcctagtcatagtgacacataaaatttaaccatcgtacatagtatatatttttcttttttcaaactcatatttattttctgtgtctctcattaaaaatctatgttccatgaagacaggggttgttgtccgattgtttactaaagttttctcactgaccagaacagtgcctgagcactcagtaaatatttgttgaccttattaatgcacttgggttggattgttgagagatgcttaaaactgatttggagacctttggcccatcacccacatcaaaattgtaagaggttcaagagtctaaaatagaagggagtgtctttggttgggttggggggtagtttatagtgtgctgtgcagctgactctattagaaaggataaatctctggttagcacagcagcccagttgctgagaagcaagttgtgagcagtggcagtggaagagactccaggaaatagaaatcagaggttgtgaggggaagggaaatctaaacaaaatcaaaaacagaaacaaaaccctcgaaagtgcctatggaagaaaagaatcaactccaattgagagacgagaaagaaagaaatcagctagttgatttgccaaggggaaggtccttggcagaacttctcttctaacaaaaggaaaggagcagcgtaaaagatcaagctgcaagcatagataagggaagcaagacccagcaccaaagagtgccttctgtgtgatcagcaagttttatatacatacggggaccccagtgagcacattcttatctttttttggatatactcagataaggaggcttacacaggagggcttgcttggaacatgcctgcagctgcacagataaggagagttacactgggacaggcacatccacaagggaagattctgcccgctgccccctaacacatgtgcagtaagggaaattgagcaacatggagtaacttaggctaagatcccccatgtgcattggaaggactgggtgggggctgtcaggaatttgcaccttatgcagataacatacccagtcctaaccgggttttcttgccttatgtagataaagaatcccctccccactagctcgtttataaaattcttgtatttcactgtaggatggctacccttttacgggacccctctctatctcagagagctttctctctttctttcacttattaaacttctgttccaacttcacccttggtgtgtccctgttccttgatttccttggtctcaagaccaagagctttgggtagtaggcaccccagaaaacaaggcctgtttcacaatcacacaccttgtcctgataccagatgacagtaacacttgccaacaacaaattctccttgccggtaattacctgttccctagctcaaatcctggaaggttagggaaactcataaatgtttggataaagaggaagtatagctaggatagggttcagaaattagccatatcgtggccgggtgtggtggctcacgcctgtaatcccagcgctttgggaggccgaggcaggtgaataacaaggtcaggagttcgagatcagcctgaccaacatggtggaaccccgtctctactaaaaatacaaaaattagctgggcgtggtggtgggcgcctgtaatcccagctactcgggaggctgaggcaggagaatcgcttgaacccaggaggtggaagttgcagtgagccgagatcgtgccactgccctccagcctgggtgacagagctagactccatctcaaaaaaaaaaaaaaaaaaggaattggccatatttactctttcatcctccatccctaagtctgaagtaatatctagctggaggagataagaagttctatattatgtaagaattttaattattttattttacattagaattgatattttaattactgacatggattgtttgggacttaaaatacctggaggaatgtttatttgtcaagagtgattgagaatgtttttacaccagccaaaatgttcatctaatggctttgtagaagtaatgaatcttcaggcttggtttaagggggtagtgacaaaaaagaaaagttgtttaatgctaacaccgtcttaaatttagttcatttaggagaagaaaacacatgtaaaggccgtagggtagtgttaagcagatatgaagaatttagtaactcttaactatttttctcagtaccattaggaatggatgttgacttttatttgatgtataaccttatgtcaaatgtccgttactgaaaataaactagacagaaagcacagatccatgaaacctgtctttatatatttatattccatcatctctgacccataacagatgctcagctattttttgagaggatgataataagagcaaacatgactagctgccaaagtgaatgaaacaaccataggcattctagaatctcaaaaagatggaattggctagaacatgagagaggatttagggagtaggtagggctaactgatcattaaagaattagtaaactgtggctagaaagaatgagtttagtggagtagggtgaagatgaggaagagagagcaggtaatatgaaagaacacaggcacaaaagttgtactgtttgccataggcagagaactttgatacatcttactctgaatttcttgtaatcaaattagctgttcagtgaatagggctttcatgtgtttgcaatggtcactttttttttaatagcataatgctcttatgtccaataatggtcactacttctggtcatcacagtccatttctctctctctctctctctctgtttttttttttctcttttttgtttttttttttcagacaagttcttgctctgtcacccaggcaggagtgtaggagtgcagtggtgtgatcatggctgactgcagccttgacctcctggccttaagcaatccccccaccccagcctcccaagtagtggggagtataggtgcacaatatcacacctgtctactttttttatttttattttttatagagatgggggtcttgccttgttgctcaggtttgtctcagactcttgggttcaagtggtcctcctgcctcagcctcccaaagtgctgggattatgggcatgggacactatgcccagcctcatagtccattttgattataattgatctgagaagtttagttatgtagcaaatgcacatattttttaatgtcaaatgttttgatgtgctaagagagctatttaattttaattttaacatcaaatatcttaaagttggctaaaaattaaagatggtttaactcaaaacattttaaatataaaaggagttttgtaattggagttacagaaagaatatttaaatgtcactagtctagaaactggaaacaaaggtaaggaccagttttggaccatcaaaagataatttaattagcaagactctctgattttcaggttgttgcttatgttaaatgcaactatgtggtggtatatcatggtgtatatatttctggtggaggtgtataactaatcatagtagttttactcaagaaacgtgtaacatttgcagttgagaagcaaaacacatacacattataaagcacaaagcacataagcccatttatcaaataaaaagttgtttggatatttctggttaaaatcattttctttataaatgctaattattagagaatttctcttgcagacccattagaaactagagatatttgtttgacatcatgaaggttatctttcccaaaacttaaactaaattgttaatgtagattgaaatgatttgaacaaatacatttatttgcttatggatgaacagctattaagactcttatttttcataagttgctaagtatgtataatatgttaaaaaatcctgatggaatattttgaatacattgtgttctggtaattttacctaaattgtgcttgaagagaatctgttactttagtcatgtcagctaaaagtaatcttatcttactttgtcagggaaaaaaaggacttcctcaaatcagaatgcctaagatatcgaacctgcagagaagtgcccccacatttgtattttttttaattaaagatgtaaattatgaatatgcaaatataaccctgaatcacaatacattgaaacatggacacattcttaggtctgcatatttaacattaagattgtgaggtattcccaattattcaggttcatttgcatataatctgctttttagaactgatttaaacaaagacatcacaggatgaaataaagcaacttgcttcataagaaaaagtcatattgctgcagaatatcttgacagagggcatggctgacatttttaatttctagatgcttgcatcttctgtaattatctttcagtaactatattcagaaatgaagctggtttaatcaccagcttcattgatggtacaaatgacagtatgttatcagtagtatatttccaaacccactctgcagttgtatcagcatggaatgcaaataaactgtaccaggtatattaaaagctgtgagttattttctgtaactcatgcttgtttgttctactgatcagcaggcagatgctgcagcctagttatcaggaacaagtcccagctgagagcacattccttttgtctgtgcagaatctaataattatcttcatgagtattgcttaagagaaggaggagcatctgctctgttggtcattaagacaacagacttggtgaaacagttgtgatcatccaaatctacactaaattaacatcattagaattgagttaatttacttatgcttacagaatgatgattctacaaactatagaacttgcattgattactaacccattgcaagttcttaaataacatttatttgttgaaataaagttaataaaaaatccaaacttcttaatggggaatattctagaattgactacaatgaccaaaagcaaagttatttgaattcttagaaattggcatttgctgatgctaattattttcaggattttaggtgtgtgagacaagttctgggtggttgaagagagataattattttaaagatacctagatttgagtcacaagcaagattttgaatgttggtgaattcgccattttgataatattaaatgaattgggattatgtgtcttagccattttgataatattaaatgaattgggattatgtatcttgttaaaaatgcaaaagagtgaagactttctgtatatcaaaaagtttattttatgtctattagctgtacagctaagatccaactaaattgcacattacattttaagatttcagatcactactccccagagattctgaatcaataggtcagagaggaatccagagatctgaatttttcagctcagatgattataaggctacattagtcccagatctgcaatttggaataatcagcagaaatctctctctttttccttggctctcccttcttcactctcccttcttcctttcttccctgcctccctccctctctccccactccctccctctcccctccctctctcccccctctctcccccttcttccaccctccctccctcccagtctcccttcttcccttcagaataaacttccatacaactttctagcagatatctgtaatgatcttattggttaaaacttctttaaagtctgtgactaactcaatcactgaaaatgattatgaatcctaattattggtttaaactgatcaggtttgataactagagctgaggatgagcaaccatgcctaagtcctgtattaaagtgtgaacatccataaaaaaaaaaaaaaatgagctctgaatgaagctaaaaagaatatctcaaaagtaagccatacaaattttctgctagtgtttcttattttaccaaattttttttgtgggtatattctgtttacccctggttaggcataatacattaaaaaaagagtagctttctgatttgtttctttgaataggtagaacaaatttgtttggaacataaatgagacattttgaatttttctatattccttctgttcattctataatataaaaagcatatttagaaaatataaatatattaataaagaaaagatttagtaaatatgagcaatatttatttatcatcagtgatcaaataagaaaaaagatgagttatgtgtttgggaattttagactgtccttaatatttaaacttgcatttgcattttttgttttttgctttaatagcgtaaattcaaaatgttcctttttaaaattaccaattactgtgcaggaaatataaataataaaaaaagataaattattcaagataagataatcaggtttctgctttttatgttttcctttgtgtgtgtgtgcctcccatttccttgtttgtcactgttttccatacaccacttatctcaaaagaaagaagccactagttggtcaaattgctttataccttcctctactgtatctgcacatatttcatactgcatactgcacgaagcaagcatgctaggaatagaaaatgaagacacttcaagatgttatgctttctcagcaggtatctgattggtggaatgtttatttagatgtatatatgtttgttcctactcgttaaccaaggtgatcgcaataagaaactgaagtcatttcaaggtgataaatgacactgtcatccaaaaagcacgtctcatttttttgtctttttttttagtttaatgcatattactaggtcacattgattatgtagcttagcatgggatatttatattgcttttccttaaaattgatacattgctcatggtgatgataaatagatccttgtaatcatattatggcagattggcacaggaaaacattgaattaatttaatcatttaggcattgtattcaggtagcaacaaaaagctgccttacatgaattataaatgtaatgttttctcaagtacaagaaattcagagtagagagttccagattagagggccaggatgccatcaaagagagtgctaactctttaacatcatgcttgttcttaattttaatataactctcattttcatgctgtttagatggccgcaaaaactccagccatcacatgggtgtttcaggcaggaagaagggcatgagcaaaaggagaagtattctggatggctgagcccatgtgcatttctttctgacttctgtcttcaatttattggccaaaatgtgatatatgataagagaagatgagataacaattattatttaaaagcgggccttcctaactttacaagcaaaagcagaattttgtgctaagaaagaagaaaatacatttggtgagcatttagcagtcttgctgcatttatcagtgaaagagaaacttgtcttgataatcagcttactctgaataaaaaaaagataacataagtggggaaaataaggttcaaaattcaaggtatctctaagtgggaaatggcctggagagaggagaaaaggttaagaagtatgtctaactttccgtttagggttgccaaaatcacatctgctttcactggatcaactaatattcctattctaataactgtcagaattatgtgtatatatatatacttttttttcattctcctccatttgttgttcagaggatgtagacagttgactccctggtgtcatctaattaatattcaacatttgcaaaactggactttatttcttcccttcttgccttctgtctgccttttttcttttcaactttgaagttctgaggtacatgtgcaggatgtgtaggtttgttacacaggtaaaagtgtgccatagtggttgctacacagatcagcccatcacctgggtattaaaaccagcatccattagctattctgatgctctccctccccctgcccccgcaaaatgccccagtgtgtgctgttgccctccatgtgtccatgtattctcatccttcagttcccacttacaagtgacaacatgcagtgtttggttttctgttcctgtgttaatttgccgaggataacggattccagctctgcccatgtccctgcaaaggacacgatctcattcctttttatgactgcatagtattccatggtgtatatgtaccacattttctttgtttaatctatcattggtaggcatttgggttgattccatgtctgtctacctcttaatttcaggaacgttctgctactcagtcttaaaactccacagttggtgttggtttcattttctttcttacttctcatacccagttctttttaaactcctgtggtttctacctccaaaattccttctgtcactcattcttctcttgttactaccactatcctgagtgaggtcctgcaatgtgcattacccagcgaactattttctaacttgcaattataccaatttcttaatgacagacatggaaagaattacaattgctaataaaattttttaaactcacagtatctttcaagcctcccaataatatcactctaaaatattttccatctctaatgtatattattcctctatgctgaccttcagtccagccatacttacttgttttccaaatatctcctctttctccaacatcaagactttttgctcacagtttacacttctgcctcgtcatctctcactactctttccacctgttgacattttattcattcatcaagttcaaactcaacatcgctttttccataagagctttgatgatttttgcaacttgctaaggtttctcctttcttttggcctccacaacattttatttttcctttttaaagctattcaacgtatttgaattttaatataagtgattaggtagtcttagatctcatcagctagattacatttaacagaaaagagggataactacatattctttttatgctcagcactatatatatatatatatatatatatgtttatgtatatgcccagaattgtgtacacttcggtcgcgtgaatcataactaaggcattcaagacaaagccctgactcttaccagagtctaacctctggttatcactcaatgtggcagtttaagtgaagaaggacttacgaaaataagaccagacaggaagggcagcactcagcagaatatctctgtgttcaggtctccaaagatacatgtgatatcactaatcaacatgatatttacctcatgaaattatactaaatattagataatgactgtgaaattattactggaacattagtgttttaaaaatatttctaattgtaaacataggtggagttaggttgccaggacactgtaatagcatttgttgataaatgtaaacccagaattttaaaataagaaaattatgcatatagcaattgttacaaattatatttactcttattttaagtggtaactggctggagaaacagagatatgtatgctttttaaaattcctctttgaggtcagtaggaagacagattgaatctctattagaaagcagcaaattttcagccgggcacagtggctcacatctgtaatcccagcactttgggaggccgaggcgggcagatcactaggtcaggagattgaaaccatcctggctaacacagtgaaacccccatctttactaaatatagaaaaaaattagccgggcatggtggtgggcacttgtagtcccagctactcgggaggctgaggcaggagaatggcgtgaacccaggaggcggagcttgcagtgagccgagatcatgtcactgcactccagcctgggtgacagagcgagtctcagtctcaaaaaaaaaaaaaaacagcaaattttctggggtgattgtggccttcactagtcactggggaataaatgttgaaagcatttaaaactaaaaagaaggtattttctatacctcttattaatataattgacttatatccctctataccccaaaacagaataattatacttattatatatgtacgcaggtgattatttaaacattttctacttaatgcaagacactacttctcttagtgcctagcaattccattactattaagcctattactaaagccacctgggagttatagttagttatctatatctaaaaacataaacttcagattcatatattgaactcctatacaacattttcatttgtaccattttaaagttagcatgttcaaatgttgacatcattctattctaccccttgtttccccatctcagttaataaaaatgtcactcttctaaaagctcaaagtcaaaatccttgacttcatttcacactctactctcaatccatttgcaatttttttttttttttaccttcaaaagatatccagaattggtcatttacttctatttcttctgctaagcctagtctaaaaagtataatcccttccctggattactgaaacattcccctaaatggttttactggtgtttcatttgccataattcaatctattctcaaaagagaagtcactgatatccattaaaaataatagtcatggcccctctcgacttcactctaatgtctccctagccatctagaataacagcaaaattctatatatgggcttacccaatcctgtctgttctagtgctcatgtacctaacttgaatttgtatccactaagtccatcccaaagactggccttgaactcttgcaaccagtgatgtcctagaattccatatgagtgttaatgattacatttgcaggaactttaaaaatctattattaaatcaggccagtattaaatattaaattatataaaacaaaattttaaaaatatatattgaaaaacatatgtaatatatgtctaaaactcatcatttactattttactcttcactatattctggaggttattcacgtctatcatgtctgtatacacactattgtatttacatggtaaatatataaataaaatatagttgtcccaaccacaatcgtacaacggtgtgctactgtacatttgtttccagctctgtattcagtgatttcatgttggtaagttgaaactaactatggtcagagtattttcaacacaaagattcagagagcaatataaatcaggggtctttctttaaccccaaccacaacacttattattaaaaaccttcatcagtgcatagagcacaccattaatttgcatttgtctttgtctagaaagctcttcttttggatagttccatagatgcctttcacgtatacactacatttcttctcaaatatactttctctgacacattttccaaacatcctattataaataacatctcacccttgctcctttgtggcctctttttcttcatggcccttatttgtgatctaatatctaatatatttataataaaatatttttattatgtatatattccttcatttccccatgcttatgtagacttcaagcgagccaagaattttggatgtatgctctagcacttaggatggaacttacaattatacttaaaagatgcttaattatttttcaatttggtgctttctaaaagtttatcttctgatctgttgtttttttcagcaggtattcatattgtctgaaaattaagcctatattagtgaataaaaaagtttcaataaatactgacgaaagaaagaatatgctaaccatgttcttttgacttaataaaaatattagaaattaataactaaatcatatatatttgaagaccaaatttccagttataaaatatcctacataaaaacaaatcacagtataaattaagaaatatttaggacatgaggttaaagtaatatataagatgtattactacaactaaataagcttttattttaaatgttggggaaaggagataaaatcataaagttagaaataaaaatttaaaaggtaagaaaaacaaatacatagacaaaattagaaattaataaaaccaaaaatttggttctttgaaaaatatatgacttttaaaagatctttgaaataaatgaataagaaaataacgtaagataaacaaaatatagaatgatgaaacataaatgaccgtaagcaccataaaaataatatttaaaattaagtggatacagtattaatgaaagtattttacttttatatacatatatacagtattagtaaaaataaaagcataaatattagcaaactataatattctattgaaatattgtatagtgatcagtgatgtggtttggctctgtgtcccttcccaaatctcaccttgaattataatccccaggtgtcaaggcagggaactggtaggaggtgatttgatcatgggggaagtttcccccatgctgttctcatggcagtgagagcgttcttatgagatctgatggttttaaaagtggcagtttcccttatgtgctctctctcacctgccaccatgtcagacttgctgtgcttccccttcaccttctgccataattgtaagtttcctgaggcctccctagtcatgtggaactgtgaatcaattaaacctactttgtttataaattgtccagtctcaggtagtatctttatagcagtgtgagaatgaactaatacagtaagattgataaaaactatcctctctttgcaaagaagcaatatttaggtaatacttgtttagtttgaaaatttcttaatgatcagaatatacatagatgtattctgtacacatctacagaatctacgtgaatcttgaatgacagtctgagtgtattacaatacagagattttaaacaatctgcctcaaaggtgagtatttgaaaaaatgttaaactgtttcagttttcttctccttctaagttactattacggactattattcatagttcggaggtgtggaaataagcaaagcccatccacatgagaacaggggctgtttattcaaagcttgctgtagcaagggagtcagccaccatcacttgcatttggccacccctcagaggcaggcagggaagtcagaaagtttcagagtgagagaaggtaaggctccaggtatgctcatactggaggctgttggaatgtgaaagctggaggcaggctgactggaagtagaccatcctatgcaattggcttgaggagcatatttgggattcttcatttcgttatgaattgggagtgaaactagaaagtatagaaggtggaaatacaggccaggagcggcggcttatgcctgtaatccgagcactttgggaggccagagcaggtggatcacctgaggtcaagagttcatgactggcctgactaacatggtgaaaccccgtctgtactaaatacaaaaaaattagccaggcttggtggcacatgcctgtaatccgagctacttgggaggctgagacaggagaatcccttgtacctgggaggtggaggttgtggtgagccgagatggcgccattgcactccagcctgggcaacaagagcaaaactccatctcaaaaaaaataaaaaaaaaaagaaggtggcaatgtagattaattctgacccttggttgattgcttcagaggttgcagtttggcttcctggactggttactatagaatttgtgagtcagagttctattgtgacatttagtctggcctaatttgaactgatttacatctgttttctattatttttattattattatttgtaaagataaaatataatttgtaaagataataataataagaccagctgtattagccaagctggtcttgaactcctggccacaagaagtccttctgccttggcctcccaaagctctgggactataggcatgagcccccttgcggagcagatttaaagctgttctcatcaaccacttcaacagtcagaacatgagcaatgagggggccctttaatttgaacaaccagagcacctcagttaggtagataaaaatcacaaatattattttggtgttagtgacaaaagaatgtaggaaaaaaatatgtttcagtgggaactatgcattttccagaggatactctctccaaatcatctggttctagtatttgactgcctttgagctgattttcaactataccttttctacatccagcacaccctgctgggttatctgatactaattctgtttttgagctactttacaactctgtataaatatgcccaatcttttcattctctctgtgcccacttataatatcgaacttcttccctcactgaatgagttaaataaaatctttaatgcttgttcatttttatatctgtatgagtcatgactttatcttttatttctgaaaatcatctttaaacaaaatctttgacttttatgaagttacttagatctgtatttttttcagattaaatgacacagaaatacgcaataaaaggacaacttaaatacactgaatgtataccgtgtctcaaacaaaccagaccacttagaattaagaactgcagttgtaaaatgctgatgaaggccagtagcacttaactcaactaaaacagtgtggctgattttattggcttaaggtttcgatatgaattgggtgccctgagcttcagacttggatttatttactgaaattaagcctgaaaacgtaatgaaaaaagctggctgtaatcacaaaggacacatcacatcatgacaattgccactcataaattattcaaactatgatttaatatgctactaaatcgttcggcagtataagtactggaaagtaatacctttagcacaatttacttttaatattttatagttgtacttccagaaatacaggggccatttccacaaataaaaggccaaatgtttttcggcatacaatactctgttacaatgcctaatctcaacagaaacagtcatcctattaaaagttatcttttagtataatatctattcataataaaagatatttgatgcattgtgaaaatcttctctttagttttttaggaggttattttgttagtaatttcataaataaggggaaaaacatttaaagccttgtctcaagacatctgattgaatctttggaaagtcttccaaattagaaaagattttatcaaatgactgcatagtgttttttatttttgtttatatacttttagtatttttcttagtctgttcagactaatagaataatgtagattgcatggttccacaacacacatttatttatcacagttctgggggctgaaaagtccaagatcaagacagtggcagattctggatctggtgagggttccctttttgtctcttagatggcggtcttctcattgtgtcctcacattttaaaaaaacagaaagttctctgcaccgccctgtataagggtactaatcccattcatgagggctctatcctagtgatttaattacctcctaaagggtgcacatcctaataccaccacattagatatttttaaatttttaaatttttaattttgatagttacatagtaggtatatatatttatgggatacatgtaatgtttcgatacaggcatacaatgtgtaataatcacatcgaggtaactggagtaaccatcaccccaagcacttatcatttctttgttttagaaacatttcaattccactcttttagatattttataataatagagttagatagaataaataatatgtatttgctagcacaacaggatgactatagtaaaaaataatttatcatagatagctcttattattttgagatacttcccatcaatacctaatttattgagagtttttagcatgaagggttgttgaattttgtcaaaggccttttctgcatctattgagataatcatgtggtttttgtcgttggttctgtttatatgctggattacgtttactgattttcgtatgttgaaccagccttgcataccagggttgaagcccacttgatcatggtggataagctttttgatgtgttgctggattcagtttgccagtattttattgaggatttttgcatcaatgttcatcaaggatattggtctaaaattctcttttttttgttgtgtctctgccaggctttggtatcaggatgatgctggcctcataaacttaaagtataataataataataataataataatcatcatcatcatcatcataaaaagaaaaaaagcaagaggcggaaggtcacttggcaaaaaaaaaaaatcatatatttcaacatgtaaattttgggaaaacacaaacgttcagtacattacagtattcctgagggtatgtgatttattcggtaatttatttattcataatgattcagataaaaataatcttgttattatctcttcaaaagtcttctccaacattgcagtgaaaataatgtcactattggtaatcatgttttgttatgctttattactaaattgaatgtttctttgttacccatggtactggcatttttttcatgttaatatgagctatttactgctcattgggtttttctttgataaattgaatgaattcagttgcttttcaaaattctgtagactgtgagttttaagcattttcacgaaatgtaaaagtacagctacaaattattactgcttatttgaataacgttagtttgcattatatagaaatgcttaaatacttctacaaaatcagtgtctaatcattagctttctgctaacagaaataaatagaacaagtggaaacttaaggtcaagttcttaaaatcctaatacatatctgatgggttaaagatttaaagttgaagcaacaatatttatttacataataaacataactgaagttatagtttagatttttatacattttctatgaaatataatataataaacttcatgtttgtaaatattatgaaataaattatacatattacaatttctagaaacacaatgaaattatttcctatatatttatgtataatgatccatacctccaatttctagaaaattaatttagaataactttttatttctttcatttttctccagttttgaagaccctgaagtctatgatgatatctttgtctctttaccaatattcaaaacaaaaatggagttgacaaaacccatttatggcttacattagtcaactctagctgccataacaaaataccatagaccaggtggcttaaataacaaagacgtattttcttacagtcctgaagcctgaaagtccaagatcaaggtgccagtatggtcctattttggtgaaagttctcttcctggcttgcagatcatcatcatcttactgtgtcatcacatgctatggagagaaacaaaaaggggaaacactctggtgtctcatattagggcactaatcccatcataagggcctcactctcatgaagctcatctaatcctaattacctctcaaaggctctgtctccttagaatattgcagtggtgattaggatgttaacatgaattttaggggaacactaccattcagtacataacagacctctaaagcttcaggatctctttctgtattttaatgccttataaaggtaaagaattaggaataacccattagtttcaggagcttacttaatctcaatcctgtttaaatcactactaaacatatcttatacttgatggatctaagaccctgcttgtaattatacagcgtccctccttttctcctgaggactcactcttattttgaggaatctcaacttaaactttgtttcaatttgtcctgataatttttattctttacttttgataacatatatattttcaaaactaaagacaaccttctattttaccctttaaatacaatttaaaatgagtacaatttaaactttgaagagagatttacacacatattccaaattttaaaatgtcaaaaattataacttgttacattttgaatatcagaactggatctttgggggttttttaaaataaaataaacattggttactgaaagcaaaactgttgctataattgaaagttgttgaagaaataaaggcttccattctttttcctaaatagggcctatttattttcattttgtctttttagagctgtgcttgcaaatggcaagcaaaatgaaagattgaagcaattatccacatcattcagatcaaatatgctctcattaaataagagcagatggtgtggataaaaattgtagcttaaaggctatgttcctcatataaggcacatgaaaatagattgtttcttctgtgcatttattttagaagtctacaccttcccttacagacgagtttatttaaaatgttaaatggaagcattagttataacttacatttaattagtttaaattaatatgttcattaatttagattttactacccttttgtaaacttggtgagtgtagtttctgttataataaaaataataagaatataataaaaatttaaaaactacacccaccaaatttacaaaagggtagtaaaatgagtatatactcttacaccattaattagaatataaatgttttatctgggcttctggcatccgctgctggaagctgcgagtccctcaatgccctccaccttcctcagaaatatatagatgcctggaagaaggatacaccaaggcaccaatagatgtcagagtttattgtttccagagtaactgcaaaccacttccccaagaaaaagtgctcaggttagatcccaagtgaaacaacagtgaataggggcaggaggctctggtttttattgtggttaggtgctgcagccggggtggttttcctgcctggcttgcttgccaatcagcttcaggtatgatgccaaacgtcatgaggtgtggggaagggcttgaatgctgtcagaagtcaaacatcaaaaatggtgtcagatttgtttttttttaattttagatttagtggatacatgtgcaaactcgttacatggatatagtgtgatgctgaggtttgggtttcagttgagctcatcacccaaatggtgaaaatagtatcagattccttttaaacacttgcttctctctctccctgcctgcctttcaagtctgcagtgtctgttgctcctccgtttaggtccgtgtgtacccaatgattagcttctacttacccatttttaagagaacatgcagtatttggttttctatttctgttaattcacttaaggtttctgggggacactttggagatagacatcaagaacttgtgtaatgtttacactttttagatattcttaattttggaaatgattctaataaaataatcgtagacattcacaaagatattcatacagaagtttattgtgatattgtaatattacatgacagacttgaaaaaagtttcaaatatatcaaattatacaattaaatatgaaaataacatattttatataaattattagtttacatgcttaataaattgaataccatccaaatatttaacaataaatatcttataaggatacttttaaccaaagacagaactcaaattacaatcatgaattaaatgagaatataaaactttttatggaatatgatgtccctctatgcaaatatatgtatatgtattattttggaaggaaatgtactatattactagtggttattccacttggtttgactatgaatgcttttcatcttctatgtatttaacattattttctaaataaattataaatatttattacatacatagaaggaaatattattattttttattttcagaaatatatcagagaatatcttttgaattaatcatagtctgataatttctcatagcatatttggggaaaaatttacagtaatcccaaagatacctgcttattagaaatacgcatgtagagtgagagccttatttaagattagaatcaaagtacatttgagacgatcttcttttaatttaaatttaaaactcaatgttggttgcctaaaaattactagagcatgattatatcaagcttctaagcttctgaatcggaattccttattaaacagaaaaatagctgacaatgtgaaagtaacacttggaggctctgctggaatagttcttcctctttaaaaaatttaaactgaagaatgtagtcaataaaaagtaaatgactactgaaaaataaaatatgcagtttaaattatgtgtttcctgaatgctcaatttctaattattactatgagtcctggcaccaaggtcctggtttttgctttattatcttgcttagtgtgtgtgctcaccaggacgtatcattctgaatacaagacacatgggttttcttttctttcctttattccttgctttctctctctatttcctattttatgataatgctttgcaggaaagatgatttgtgaagtggttgtaatcattttataaacatatataagttataaaaccaagatcatctggcagcataaaacaatttttaaaaactgcacagatttttgaaacttgcattatcttatcaggatgggtgttccctggactaatagtttaattatattgagtctcaatttcctcatatataagatgagagctatatttgtcatacttttagaagttttgtgtatcacttgactggttgggttcttagcaatgtttaggacaattattaggcatttaagttataatgagttataagttacaatataatggatttttatttatataacaaatatttgctgagaacctatcttatgtcaggctctcttccagttcccagggatgtagcagtgaagaacacagatgatgcccattgactgcacacactatgcaaatactttaacatgttattaatattattatgctatcattaacattattaaggtagttatgagagtaagtagaatattatcttagatgtttagggagtatttcctaggttcagctagaactcattgatgtaatacatttaaactactactaaaaatatatgccaaatgatttcatatatttgcatgagataaaatgaaatgacttctttacagctctcaagaacataataataacattttccatttcctgattctcagtgtaaacctgttaactggaattaaaaatgcattgtggtctgagaattttcttaaagaagacatactgagttcaataagtttccttagagtaactgcaatagagagttttatagctgtatttctcatgatgtgcttgaaataaatcagtggcacaatggtaaagggtgtgtaagattgagataaatctagaaaggcccctaaaagtggaagtatataactatctcatcgactcaatagagacactcaaaccatcgggatgtatgctatactccacttgtgaacatgtttttgtttttttttttaatttgatggcacacaaatataatttcacataaatatttatattctcagctttctacaaaaaaaattggaagatatggcaacatttagcctacactgatgcacaacgaccacatccaatatatgaacaactacttttccccttaaataatgcgtaagtcctcaaattcacttactacctactgttgtatgttctgtattccagcccaaccacagtgggtcttgaagtttgaagtcattcaccatatataagtatatacttttatatatgtaatggaatgtttttgctttgtttcattcaaaaaactttccttaatgttatttcttcaactgttgtaagagatgtatttggagattatattttctacatatatatttttatatatgtaatatataatatatatgatgatataaatacataatgtatttatgtaatcaaaatgaaccatataaatttatggtcaggtgtgctgtttgatatcatttctggaaatctgaaaagagtgcctgaacttaatattgctaacaaggtatctttattggttctaacaatagagtaaaaaatgtagacaatgccaaagtcttcatggagtttacattccagcgactaaggcagtagataagaagaataaataaattatataattttagatgagaaatacaaagacattaaaggagaaaaagaggaaagagaatgaataaatttgggtgctgattattttagagtagatcagacaattcctctatgaagacacagtatttgaggagagagatggtaggtttttatatttattattagtaattttattctgatgtacacaggagacattccgaatcagatttctaattaattaattacattacattgaaaataagcatgctgcatcctaacctccttgcttcagtcctttcctcttcagatcattcactgaaaactcagagaggttggaagctggttttcaagtagtggtagactccataggtgaaagatgagcaaaaataattttctctgtgtataaaatggaagaggtagccgtctcactcccttcatgaaagatttcttctttagtctaatccttagttatgtaaataaaatatctccaggaaccaagtatcagtataggtcttggattttacaatctagaagtgtctccaagtacttaagtagatagctccctagattcccagacacctgtggcttaacctagaacctagtccaggctgcaaactcttgaccccctcagagacattacactgtttttattatccatttggattagataaaatcactagaaaaattgctacacagctaatcctcacggtatgtgacaagtcataagaggctttctctcctctctctctctctctccccacatatatacaagaacatttaaaattcaaggaagtttcatttccccacaaaacatgaatacatgagcatgcatgaggaaataagccacgtggcaaatcttgtgggagaaggtcttgagcagaatctccttctgggcagttggggcctgcattagaagactgagtgcttcaaccaagtgaccctgtattagaccattctttcattgctgtaaagaaatacctgagactgggaaatttataagaaaagaagtttaatttgctcagggtgctgaagactgtacaggaagcatggcagcctgtgctcctggagaggacatagggagctgttactcatggtgaaaggtaaagtgggagcaggcgcttcacatgttgaaagcaggggcaggagagatgggaaatgcccacacctttaaatgaccagatctcgtgagaactcactatcatgaggagagtaccaaggggatggtactgaaccattcatgagaagtgcatcaccatgatttaatcaccttccctcaggccccacctccaacactgcagagtacaattcaacatgagatttgggtggagacacagattcaaaccatcagaccctgaaacacggtgatatttttatcttttccttaagttattttctaatcttgtcataattaactgtcttaaccacaaccatttataccttttactcaataaattagcatgtgagttctgtattcaagatcttgggggctgggtgcagtggctcacgcctgtaatctcagcacttggggaggccgaggtgggtggatcatgaggtcaagagatggagaccattctggccaacttggtgaaaccccgtctctacttaaaaaatacaaaaattagctgggcgtcgcagcgcatgcctgtagtcccagctacttgggaggctgaggcaggagaatcacttgaactcgggaggtggaggttgcagtgagctgagatcgtgccactgcactccaacctggtaacacagtgtgactgtctcaaaaataaaaataaaaataagatcttggggacctctctggtaatcccactgagggtctggatctggaattgcatctgcctccttaagataaataggatggccttggttatgagcagctatttcatctacatattcatggagagtaaaaaaacaaaaacaaaaacaaaacaaaacaaaaaaaactttgtctcttctttatggtacagcaattaaataataatatctgtaagtcataccaagttaaatcaaagaacataatcaacctaacaaactcctctataaactttcctggatcctccaaaaactggacaaactttctctttgcataaagtcaaatcagacacagatggatggaagagtgtcccctctgcccacctccaaaattggagcttagcctgggagggttctttgcttcactcaggaaagaatttatgagtgagctgttggtggaagaaagcaggtatactgaagcactggaatacacacactgactgctccttgtagagcagggcaaatccgtaggtggtgtgaccagagtagcagcatacaagctgttggctagcagtgtttacactcatttttaattatatgcaaataaaggagcaagttattcagatatctctagaaaagaagcagtaacttctgggtgttgctgtggcatttgtaaactgtcatagcattggtgggagcgtcttacgtgcagtgaaagcaactagagtttgccttccgtgccattttgctggttcgagtttcttttttccattctgtcgggaccaggatataagtcctgccaatctcctgctctgtttccattagctctttcccattcttttttctttttttttttttttttttttgagacagagagtcttgctctgtcgcccagggtaagataagctctccactcacttcaacctccactttccaggttcaagcaattctcctgcctcagcctcctgagtagttgggactacaggcgtgtgccaacatacccagctaatttttgtattttcagtagagatggggtttcaccatgttggccaggctggtctcaaactcctgacctcaagtcatccacccgcctcagcctcccaaagtgctgggattataggcatgagccaccagatccagcctctttccatcatttaaatattcttcctgcttttgttccagcagaattgaattcagcctctttctcttattgaaattgttttgaatcaagtcttccttgcctgtttcacttatcagctgcaattttctttgaaaagcaaacaaaatgacaaatgcagttgcaaatatattctcaaaatctgattcaaatgggcatgttttaaagtatatattaaccaaggcactttcatgaccagccagatatattggaagcatgcagtctccagaagcacaagaaggcctttggcaaatcctcagggtgcttttgtaggaagctactttgctcagtgttctaaagcatgatcttatggtgaaaaatggtaagaagcaaatgcaggttgttagtttggaggaccactgggattttgaaaagatatttactttatgttttgtaatgatcaaaatgttaatactgataatattaataacaataacagctaaagtttacctgcactaattacatataaccctcacaacttgttgtgaagaaattttttttttagattttttttcttgttttattgttatactttaagttctggggtacatgtgcagaacgtgcaggtttgttacataggtatacatgtgccatggtggtttgctgcacccatcaacccgtgatctacattaggtatttctcctaatgctatccctcccctacccccaccacctgccgacaagccccagtgtgattttttaactattttactgatgtggaaagtgaaacttagggagattaaaagcaaagcaataatttaagtcgctatttccataaaaacatgtttctgagttggagcatagatcttccagtaataccctctgctcttttatttgtgaaatcactttccaataaggtattatggactatattcaataacacaacaacgttgacccagatcaatttctgaaattcagtcaggtgtatgacattggctcaaaactccttagcaagccatgaacgagcatgtgtgatcatgagttacatagtttgtttgataagggaattataatttcacaagaacaactgttgccttctacaagccagcctgcagaagattccttgtgcacttcacagaaggtagctgggtaaatgtacattgttctaactttttaaattataatttttctcttggtttcctaaagaataataaaaatgttaaaagctaaagcacttattagatgcttaaaaattaataaagaatgcataggtacaattgaattactatatattgcaagattataaatattcctggattataatataaaatagcattaatatctgtattttacataagaggaaattaggcggctgtggtcacttagctaatagatgtaggatttaggatccagatccgtgtatatttaattttaatttaatgctttacttaatgccactactgaaggaaagattatttgaaaagtatagaaaacagtcccggcaattgttggtgaattaaatttataagatgaaggaaaaatatggcattgatcaaaaattttttctaaaaagaatgggaatacagatgtcagaggggaatcaaattttacccagcactttatgaaactcccataggcaaaagtttaaatagacaagagatttgattccacaattctaatacttagagtttaaaacacagtatacaatatagctgtgaataaagatttaggaaagttcatgcatttcagtataaattgtgatgaacaccaccaaaaaaaatctccaaaatacaacagaaaaaggatgagatcaacaagaaccactattgtgcaatgtatgctttctttctcaaaatataatgctttattcagaagagatacattttttcctaccatgtcgtatgaatattttcacaatccttaataaatttaaagaaatataaaaaataaaaactaggaaataatacagcttaaattatgtccttttgattttgaaagtctttccccttgagctatagatttttaaacctcgaatagaacagatgcaaaatgttatattaaatattaactgttttattccaaccattttttaattcttggattgccatctctttctttatggaaataaatatgtttaaaatctattttaaatattgaagtaacttgcttataaacaacagtagaaacaaattatttccttccttcaattcagcatttatgaataaaatgtaaggttcgtaaacactgtgagtgcatgtgaaacgttagggaatttcaccagcttgtagaaacaaataagtgattgatctaagtgtcaaaaataatctgcagccgaaaagatgtcaaagtactcttcccttgactgcattttctttctccaagcttacatttaataagcttccaacagaacgtaaagaagagccaagaaaatctgcagtttttgtgttcctaagcatttgtaagggaaaaagaagaggattcaactcaaaatcaaaagtctaatacttactctgaaactaccatcaaagcatatgctgaaattatcttcatatctaattatttcaaggcatttatattgggaaaaaaggaaaataaatcagatacacatcaaggattgttctgaattcacatttaccagaagtattttaataatgaccctgacaaccagcatgtattgaaccaaaactgaaacacaaaccaaagtcatccttttaagcgtcaaactagagtaccttattgtgtgtgtatgtatatataatttatatttatgttatacaatatattttatatttcttgatacaatatacatcaatgactgtaaaccttctgaattctgcgcaattttgctaactcagtggacatatgtcactatatggagatatctttcattgacacacctttgggggataagacactattggtatctgttgggcagatgcaagggatgcttttaaatattctaggacaggacagccactgaagataaaatattaccttgtccacaatgtcaataatgccacattagaagatcctgatatttattatatattatatatgttgaatatttaatctaaattcatatgtatatattccatgtataattatttaatttataatagaaatatatatattgcataataaactgtatggggcttcactaagatactgtgtttcattttatgtaggtgttgtgggactctgtttgcatattataaactgagaacctagtaagattatggaagagcctcctgtttctccaccataaaacttgctctggtataactggaacttaaactagatgaatgcttttagagggagtcaagcagtccagacatactcctgcagtttctagattgtgaagatctaatagactcaataagtaattgaaaatgaggatgaacaaaatattgggaatattgtgaagaatggtcaacataaattaaaaatcaaaatagtaaagattcaacttggagaggtcaatggtaagaaaggcagggaaattggggaaatagaagagaaatcatgagaaaagtctaaggtaatgacataaagtaaaataataaaaataattcttgtcttttagattggcatttttggaaaggaagtaatcactgtgaatatttgtatatttgaaaaaaaatgaacaatgtatgtaactttggggcataaataaataataccaaataaagtagagtttgtgtagctatgccatcattcaatcaatagtcataaacactcagtttagcacccttctaaggattataggcgtgagccaccataatgggcccagtttgttattttgaaatatcacttttatacatgatacgtggatacaattccattatagtagctgattgtcaaactaatttgatcaataggatttccacaacaacattatctactgtattactgtatcttatatagggctattttcataaaatggggacaatggaactacttagataatccaggtaattagtaatgtctcttaatagactgtatataaagaaatgtgttttcacctattaatgaagactgaaactacagaagttgaataaaataggtttacaatattaaagtgaacatttccattgcatttttataatggtaataggtaaaattgtccaacataatacaagtggtatttagactttttacatgaatatgtttcaatgttagaatgtaaagcatggtagagtaaatctgtgggcctgtgaatatagatcacaggttacaattcatgttattttcaccagtgataagctaagggtaagcatctacaaacagtaaatactaggatgaaataagatttcctattgttctttcttctgttgaagagctttaaaaagggaaattataggctagttacacttccagttggatgagtctacccacctgggcaggatagcaactagtccatattgtgtgattctttgggatttaattttagagaaaaagagagctagtttcactaagctttctcccatcatattgtggcacagatattagagtgtacttaggcatacctgagctttcagccaagttgatggctggggtggcagggaaagaaagtaatatgactccgtggaaaatttccctatatgagaaatattacctgtacatttttattatgacatgtatcataatgtttgggatataataataccaacataattattactaactacctcaaaaaaacgaatattttaattactgtttagaaacaatgcaacaccggaagccctttctttctatatccccattccagtcacacaaaagttaacattgtcctgaattatatgttaagcatgttcttctctttcttacattttaaacatgaatgtttgtgttgttaaaatatatattatatatgtttgttttaggactgtatataaatggaaacatatagtatttatttttttgactcgatacgtttgttcattattatctacagagaaaaatccatgttcaattatactttcattttctgagctatatagtattccattccaacataacagatccaatcgttctgctatgaataaacataatacattagttcatagtgcttagagttcttgaatgaatatgctaaggagaaacatttctgaatgtaggataatggcatgtttaccattaataacattttggtttccatggttttctctttgtattttacgaagtgattgagagtgtctgttactgcattacctcactatcatgtggtagcgttagacctgtaatttttttcacttttgtagattatgtaatggaatttcactgactttacttgaatttctctattactgatttaagttgagcttatatttatttgattatatcagatgtaaaagtgcctattcatactatttatacttttttaaaatgtgagtagtctttttttatttgtaggatattttattttattctcaatgtcaattatcttttggtcatattttatgcaactatcttcttcctgatatagcttgaaattttattttcttttattttctttgatacatatactcttaatttaaatgcataattacaaatatataaaattactatgtttatatgaccatgtttgtacatattataaatatagccagttttcacaacttgtggcttcagtattgtgaattcacttattaaaacttatttgtaaccctaaaattaaatgtttcttcattgtcatttgcagacattttcagatcagtgaaaaatttgagatgttcaatgtgtacattcccaccagagtttgaactacgtgactgtctgtctgccttcctgttccaacttatattgtaaaaaagtgttttgctcatgttctagttagtggcagtatttttacagtgttatgccttttgttgctgatttctctgtttaacatgacccaaacataaataagaagtatgtctagtgttcccaaaggcaagaaagctgtgtgtgccttatggagaaaatatgttacataagcttgattcaggcatgataagttgttggtcatgagtttgatgttaataactcaacaatatatattagataaggtgtctttaaagagaaacatacataagttatgtattaatcagttgatgaaaactttgtgattagaggctcacagaaaactaactctgtatttctcctaagagaagtggctcaatgtttgctaatccaatgttcatggcaacttcaaagaatgtgtataccacaaataatgagaatagactctctctctctctctctcctctgtctctcctcccatgtatgtgtgtgtctgtgtgtgtgtgtgtgtgtgtgtgtgtgtgtatccttttgaatatatttgtatgtatatatgcaaaaaacaaagcaaatgcagtgggatcttgggacctacttagctggccaaaaacctgagtgtgtctatattttgtacacttgtattccatttatagcataagagtgagtagcagcacactgattagtaagatcaatttcagaatattgctagaaatgatgatctcttttatgtctttttaagtatgaaaatgcctgcactctcaagctaacaatagttattattagaaaaactcctaattgttttgagaacattgtattcagcattacatttcaaagtatatcaagtcttgctgatatcatgcctaaaaaacaccaaaagaaatcactttctaaaatatggtacatgaaagctacttaccatgaactttcttttcatttatcaaagtcatgtccttttctagacataagcagctggcagtattgtttccccaggagcatacaagcagaacaccatctgaagccagatgaaaactaaaggtacttatccaagtggaaaatatggcaagtttgtacattattcatgacaccaattagctcttgaatcaacaaatatggtaaaatgtttttaaagctagagagctatagaggccatgtacatacacataaaaccaaatggaaaccttacaagattgatctgcataatttagtccaaaatagttattttatttgaaatatcagtgactaaataaaacagaagttacagtagcatcatttttctgtaagtcgtaatattttttgtttgaatgaataaactaaatatataatcaatgaagaattcctcttttaagtatttagggttttgttgttgttgttttctcatggaaaaaattcaattagacaatccagatgaggaaactgattcttagaagaagtttgatcaaatcatctattggaaagtgtagtgctgaaattaaaaattatttctgccagaatacaaaatttgcattcatctctctaaatcaggatacccaagaattgattgaaatgcaagatttgcagtagattactttagctttccttataaagcaaattactctcaaattaaatatgtttgatacagtgttgcaaaaattccatcttggggcacttcaattttcaaaacataatattctttcagtctaaagaatattagcataagatttaacactgccattcacttatttaaatttacctatttaatcagatatatttaatcaagttacatatgaatacttaattaaacttgttttggttaacattctggcttagagaggagttggatttctatatattgtgtttatgcaaacataaaatgattatgttcatatctagagtagctgctaatttactggcacctattttacattcacaattttttaaggtttaaatatctaaaacaaaaaacatttgaaaattaatattttggttattttaatacagaatattcaatcattaaattaagcctgagaagaataactaatactcaggatttttattatgtatttaatatatatgtaatgagcaggagaagagagagcctaagagagacaataaataaataataaataatataatttttaatgattttttctttatattttcttcaataccccaaatcttctcacacaaacttgaattacatttttgtagaaaagtttaaattcttaaaatattttaactttatgatgaataataacaaattcattttatttctgtctgccatacacacatacacaaacacaaagatatggaaaaagctaaaatacctttgccttagtccatctgtgctactataacaaaactccataatctgggtagcttataaacaacagaaatttatttgttataattctggaggctgggaagtccaagataaggcatctgctgatgaagtgtctcgttgaggatccatttccggattcatagaaggtgtcctctagctgtgtcctcatatagtgaaagggacaaggtagttctctggttcctcatttataaggatactaattctattcatgagggttacatcctcattaccaaatcatgtcccccaaatctccatcttctaatacatcaccttgggggttaggattccaacccataaatttagaggggtcacaaacattcagatcaaagtatttcttaataaggcacataccatttcctgattggagagctgtttttcataagaaaatcaatgtttccccaggaagaggaagtggctagaacatatgcaataggttcaaggccaaaaaacaaaagtattattcatggtcactgattggagattcagtagttgccctgcatgtatgcataaggatcaagcactttattggaaacaaatttatttttgatgctttggtaaaactgtcaataggaaggttgggttttcctgacaattattttatggttagtaattttttatataacacatagtattgaaggatacttacatattttcagtacaaaagtgtgaacagattgaattccagctttgttcatactgtcccttctaccaaggaaatacagagatggaaaagaaaaacctagtgatcaaaagcagagggctacctggaagagtaacagcacaaagaaagaagaatagtgaggctggatcgccagcaaaggcctgagtggggaagccacaccttagtttgatgagcttcctccaaaagaagtatatgaagatgctactgagtatgctggttacatttatcttctcagtgcagcacatcgctatcagtttctcacctgccagaacaggtgtcctctaggaagagttgttttatatacattcattttacataactttctcactaaaacttgaattacatttttgtagaaaagtttatattcttaaaatattttaactctgtgatgaatcataacaaattctttttttctatctcacatatacatatacacaaacacaaatatatggaaaaagcaaaaagaacccttgccttagtccacctgggctgctaaaacaaaacccgataatctgggtagcttataaacaacagaaatttacttgttatagttctggagtctggtaagtcagtagtcagtttacttctccaggtcctctttaacacagtttttcttcatgctgagtgacagggacaactaatacttgatttgaagaatatttagcaagatagaaaaatcaaatattgatctctaaacttcgtaggttgctgtgggactataattttcagaaacagcagtctcatataatacaggacttgaggaaaactttgctttattatctagaataacttggatacttctctgctgtcaaagagaaataacccctaggaaatgtttcccatcttagtggaaattataatatgttgaatatctctcggtcgtacctggaaacttgacattgctaagagcttgtcttctaaagcaaaagaagttgcattccactggtattcacctgtaataaatatgaaatgcactgagtattacctggcaagatggagagttagatcacatgtccaaatctcttctcttttaatgtacttaaattaataaaattgctgaacaaagagatgaaaattttatccagactaaaactggaaaaggactttctgatatcctacagattatgaaatatctatgaaaatctggaacaagctcatagaggataccaggagctaacaaatgactctctggaagtggagtgccacgttcttaacagcacatagaagagattttgaaggactcccgtattaatactttgaaaatcacagagcagccccgattgaaggagaagaagtcagtcatccaaattattttttaatttttttgttttgacttgatatcctgtaaaaaaagcaaatggtatgaagacaagcttgctttatagctgaggagtgaggtgatggtatgcatgagggcatgtgtcttactgtcagagaaaaatagccttgggataccccacaaatacaaagacagtaagtactgtgggccactctacatcagtttctcaccaatgtagttgtttagtatagaataggaactacactcatatctgtggttaatccataatgaaaaatgtaagtcctggaaaaaggcaaagccagcccactacatcagatgttacaaatttagaaattaagcacacacatttctgtgacttaattatcttcagtcaaattttcccttccttttcaggcaactgataagttggtttcacaatggactgtaccaccatccagggacatggtcacatttaatttctcaaagctgaaggaaatatgatggtgagctgataaattcagtgactattgttgaacaaattgcagagcttgatagaattgtcttaaaaagttaattttatcaatcaaagtaactaagcaaaaattcctaagtatgttaccaaaaaaaaaaaattactgtgtagaggcttaaaatgacatggtgtctgatagctcaacacttatctgttttttgattttattttaattattaccgtaagaatttatagatagcagatatataataaaaatttttgcgatcagagagtctttggaataaaatgatcctaaggatagtgtccagtagaggatccagaatgaaactaggcagaatgaataatagtgagagatggagaggcaggagagagagagagagtaagatatagagggatgagagagagagaaagagagaaacagagagaagaaatgaatgagcacataagtatagatgaaaatagataaatctcagtaagcaaattgtgtaaaaagaacaggaatgagatcctgagcattttcctggaatagctcagcatgtctgtggaaaatttttctttttttttttttttttttttttattcaaggtagcagctttgcaggtaagaggatggctagattctaagacttactgctgtactggaggccattccagtggcctgagtgtatcaccatatttcttcatcctggaatgttggtaatagacaagatagccaggacaggataatctttcttcctctggaagagccattgtcttcgttctttcagtgttgctgtcaaggaaaactggagtctgagtaaatgctaaagaaaagagatctatttggctcacagttaggcaggttatacaagaggcatgacaccagcatctgcttctggggaaggctgcaggcagtcctcactcatgacagaaggcaaagaggagcaggcatgtgcacagagcacgcggtgagagagaaagcaagagagcaaggcggtgagagcaggtaccaagctctttatagcaaccagctcttacaggaattaatacagcaagagggctcattactgtgaggatagcaacaagctattcatgaagtatctacctccatgatccaaacacttccctttaggccccacctaaaacattgaggatcagatttcaacataaggtctggaggagtcaaataatccaaactatagcaattctacccctggccctctaaattttatacccttcttatacatacaatatagtcattctatcccatagtcttcaaaactcttaacttgttccagcatcaactcaaatgtccaatattcaaagtttcatctgagactcaaggcaaactctttatatctgtgaccctgtaaaatcaataacaatgtttttacttccaagatacaatggttgtgtaagcattaaataaacatttctatctcaaaagggagaaataggccaaaataaaggagtaacaggctccatacaagtctgaaacccagcaaagcagacattaaaccttaaaactccaaaataatctcctttgatttcatatcccacatcctgggtacatggtgtgaagggtcaactcaaaaggcctcaggcagttgtgtccccatggctttgttgggcacagcccacatgggtgctgtcttgggtttgagttgaatgcctgctgcttttccaggctgatggtgcatgctgctggtcggtctacacagccctgctcccacagttccactaagcagtgccccagtggggactctctgagggtgctccaactgcacacttctactcagtatgaacttagtaaattctctctgcaaggactcagcccctgtagcagaattgtgcatggttacccaggctttgggatatatcctctgaaatctaagtggaagtggccaagcctcctccactcttgcattctgagtgactgcagacttaacaccatatggacactgccaaggctttcagtttatactttagagccgaggaccaagcagtatctggggccattgagcagtggttggaggtagagcagtcaggatgcagggagcagcatcccaaggtggtacagggcagtgatgctccagtcccagaccttgaaacaattttgtcctccccaggtatctgggcctgtgatggaaggagcagctttgaaaatttccgcaatgcctttggggccttttccccattatcttggcttttagcacctgactcccatttagtcatgctaatccttttaacaagtggttgctctgcagcaccattggattcctcccttaaaaatgctctttccttctctattacatgcccaggatgcacattttccaaatgtttaggctttgctttattttttaattataaattacaactttaggccattcctttgctcctatatctgacactctttgaaggattttctgcttagaaatttcttccgctagatactttaggtcatgacttttaagcttggccttccatgaagaactagagcatgaaaacaatgcaaccaagttcttttctatggttaacaagggtaacctttgctctagtttccaatcagttccatgtgagatcctgtcagcttggtctttacggtctgtatttctaccagcattttggtcaccatcacttaaccaatctctaagaagttccaaactttctctaatcttcttgtcttttttcagacctccaaatccttctatcctttgcccagttccaaaaccacttccacagtttctggtatttttatagcaacatcccactctttataccaattttctgtcttagtccttttaatgttgctacaaaggaatatctgaggctgggtaatttgtaagaagagaggtttgtttttctcacagttattcaggccatacaagaggcatagcaccagcatctgcttctagtgagagcctcaggctgcctttactcacagcagaaggtgaagggaaccagcatgtgcagagatcacatggatggacaggaagcaagagagcaatgggggaggtgccaagctctttttaacaaccggtctcacagaactaatagaacaagaacttactctttactgaggatggcaccaaaaccattcatgggaggtccaccccgatgaaccaaacatcccccattaggcaccaccttcaacaatgaggatcagatttcaacaaaaggtatggagaggtcaaacaaagtaaactatagcagtaaagttgttgttgttgttgctgctttttttgtttgtttgtttgacacggagtcttgctctgtcgcccaggctggagtgcagtggtgctatctcggctcacttgcaagctctgcctcccgggttcacgccattctcctgcctcagcctcccgagtatctgggactacaggcgcccgccaccacggcccggctaacttattgtatttttgtagtaaagactaatttttttttttttgtatttttagtagagacggggtttcaccatgttagccaggatggtctcatactcctgacatcatgatccgccagcctcggcctcccaaagtgctgggattacaggcagcagtaaagttttaataagtgcatggttcacccaatttctcatcttttcagttcacatagttcaagtattgccaataaaaataattttcgccatatttttacaatgcctgtagtgtgcttttgaacaaataatgatttcctctaaggagatagatagcaaaggcataaaacaagaatgtggaatttataagccactcatcacgtagggaaggcacagactccaggatacagaaacaattgcatctgaccctgctaattgactgagttaagggcacccaaaccttgctttttaaaacaaaacagtgaaaatgtgctgcagaggagatagatgactccttagggaggaggcaaaagacatgcttctctgtgagctttaaagtgttcattataaaaagcagagatacttatccctgtaattcccccaggaaaggaactggggagtaaagatgaagattgtaggcatgagctcaattcagggaacatttccatttcagtgagcatctgctgacagtaaatccagtgataactgtcatgcagtgtggatgtcttacttctttctagtaagcctgatgagagcaccgtatacctcctggcataattgttcttgttccatctgagcttaatggggatttaaacattcacaggagaagttaaaggcaaagaaaaatgtgacggtataaaaaggaaaactatttttaatgagcttattttcttctatgtaactcatccttattttctgatttcataatgttatatggaacatttttgatattatgaaagaaaaaccaaatgatctcattttattttatttataattgtattattgatctcttgttatgatggagaccctttatatgtgtactgcaataaatggaagagcttaagaagcaatggatacaataatgatgtcagtttggctgccaggaacttggtggataaaatctgctaagagacacatgagattatttacgtcaatgagtgtgtgataataaaaggcaattcaacctcatagatttacaatttagacataactaaatatggtagtaacactatatttacttcttaattcacttattatacttgtttctcttgaccaaaacaaaggtaaactctacagaatagtttaattacacttaacgtaagaaattaatatcaatttttatgactgggagactcacaaattagtataactacaatagaaaagcactataactcacacaacagttagattccctgtgcatgagatgtctttgacctgcccagaaaggcttctacacatggaattcgcatgaaccttattataataccagcatcccaacactagccaacattaaaccctatgattatattattatatgtaagtggcaatatgctgccagaaactgtaatatctccatgatctgtaaaggagctgctctatctcaaccacagcatgaaactatttctgtttttacactaatagtagttcaagtttattaattctagcaaccaaaacatataacatcaaaaatcttgaaatagctgggcacgatggctcacgcttgtaatcctagcattttgggaagccaaggaaggaggatctcttgagcccaggaattccacaccaggctaggtaaaatagcaagatcgtgtcactacaaaaaatttaaaaattacctgggtgtggtagtctgcacctatagtctaagctattcgggaggctgaggtgggaggatggcttgagtccaaagtccaggaagtcgaggctgcagtgagctgtatcatgccactacactgtaggctgagtgatggagcgagaccctatctccaaaaaaagagaaagaaaaatctcaaaataggtatttttttaaagtattttatttgtgcaaactggatatgtctttcagagtgcaatgtctgtgttaatattccttgccagtagccacaatcattgatatattttactttgttgctactctgttgaacagaattataaaaagcttacaactgattcgacttgtggatatttaccaggacttaaatccaaacgcctgtctctggtaaacatgtgtaaacaaattgctttattaactaaaaaaaggtcaagtcctgtgtttgactaatttagtgttgaaatttctcacattaatcaaaatataagcttggtaaggaatatgctatcctaactggctaactctatgctatatgtttcaaattaactgtctgccatgtcagattatcctaaacatgaaagaaatacatatgtgacccaaagtttgcgaacctttggtgagatttgtttaaatatccaatttagttttaaaatcttatgtatattaaattgaaaatgatgactttcaatattttacccatctagttgtatatcctctctcaatttttcttaatatgcctgagaagaaaagtgaggttaaagaaatttagtgaatgctattagagacttgaattgcttctattattttaaaataatattttctacacacctgtgccttaccaattagtttattcaaaatacaaaatgtcatttcttcccttggaattttgttcacctaacaaacgctgtgtctgcattgtgtctagctacttgtcttaggtagcagagatagacataaagtaagacacaattccagaatttgagaacattagtataattggggactcggttcataagaggaaaacataaagctatgtataaagaaagactgcaacatctgcaacatcacatggactagaaatatcacagaggctacttggaccaagaaaaaagaacggaacgaaaaagtacctgagagagaagagatgtcataaagacttaagaataggtgaagaaaaggaagtaaaaagcataaatattagaaagagtaaaataaaattgtctttgtttacagatgtcatggtggtttatatagaaaatggcaaagaattgacaaaatactgctggaactagtaagtaattatggcaatgttgtaagatacaagattaatatttaaaggtcaattgctgtcttatatactgaagatgaaaatacggaaatttgaaataaaaaacaaaatatcacttatgttagcaccaataaaataaaatacttaaggtatctatctgaaaataagtatctataaaatctatgtgagaaaaactgcaaaatactgatgaaagaaatcaaagcagacctaaataagtggagagatattccaggttcatgggtaaaaagactaactatcagatatgttcggttttttccaaatttatctgtatattcaaggcaattcgaatcaaaatcccagcaaattattttgtggatgtcaacaaatggttctaaactttttatagaaaggtagaagacccaaagtagccagttcaatattgaagaataacagagttggagaactaactaacgcaacttgatctccagacttaatataaagctacagtatcaagacagtggtatcagtgaaagaatagacaaacagaataaatgctatattaaaaaaattgaaaaaatgttcaatggaacacagtagagatcccagaaataggctcacataaatatagtcaactaatctttggcaaaaatgcacagataattctatagagaaaggattgtcttctaaataaatggtgctggacagcctgacttccacatgcaaaaaataaataaataaataaataaataaataaataaatctagacacaaacattacacttgtcacaaaagttagtccaaaatggttcatagtcctaaggtaaaatgcaaaactataaaactcctaaaaggtaacataatgaaaaaataaaggtgaccatagatttggtggatttttagattacaactccaaaagcaaaatccattaaaaaaaatcaacaagaattccttaaaattaaaaaaaaaaagtttttccaaagacactatcaagagaatgaaatgaccagcagcagactggaataaaatatttgcaaaacatatactagatcaacgactgacatacaaatatacaaagaactgttaaaactcaacaataagaaaacaaacaatccaaatttttaaaaatggcaaaagatctggatggacaacctcaccaaaggaggtatacaatgccaaataaaaatataaagagacacttgatgtcatctgtcatcaggtagttgccaattaaaaaactacgtgagatacaaccacacaccttttagaatgaataaaatgaaaacactgacaacaccaaatgcttgtgaggatgaggagcaaagggaactcctattaattgattgtgggaatgcaaaataatgcagacatattggaagacagtttgacagtttcttccaaaaataacatttgcttacttcagcaagcacacttctggtacctaccaaaaggagttgaaaacatgtcaacacaaaaacctgcatacaaatgttcataccatttgtatttataattggcaaaacttggaaacaaccatgatgtccttcaataggtgaatggataaggaaactgtggtatacccataaaatgaaatattattcagcactaagaaatgagctgtcagcccagcgcggtggctcatgcctataatcccagcactttgggaggccaaggcgggcagatcatgaggtcaggagattgagaccatcctggctaacacggtgaaaccccatctctattaaaaaaatacaaaaagttagccgggcgtggtggcgggcacctgtagtccaagatacttgggaggctgaggcaggataatggcgtgaacccaggagaaggagcttgcagtgagccgagatcacaccactgcactccagcctgggctacagagggagactccatctcaaaaaaaaaaaaaaaaaatgaactgtcgtactatgaaagacgttgactttattaataataatttatcaatgtgattcaacaattttaaccaatgtactaaactaaaacaagatgttagtaacgaaaactgtgcaatgggtggaaatgaggaatacaagaattctgtgaacttttctattatgttttctgtaaatataaaactgttctaaaaataaagtctacccattaaagacaaaaaaaaagaagaaaaaaagaaaagaaaaagaagagaacaggtgagccagactttcagaatgtggagacctggcaagtatgtatttccctctttacaaagcagcaacaaggcaaggaaattcttcctattcataatttttattcaattcacagaaagctgaagttgctggggacaattaaccctaagtataagacacgtgactccaaaatgagatgagagaaaacttagcttacttgcagcagatgccatttgagcaatggtgaaaagaagttagctggattttaattgctcaagctacaagctacatgtggagtagcaagaaaatatgaacctctgagggcagaggacacaagggcaatttgcacttattcacagattcttttctattgatgtttctagaactctaaaaaaaagattaggggcatgatgatactggcttaaatgagaggctgcttcaagaaggtcagaaagccaacccaagatcctttccccctcctctcctatgggacaaaaatcttttttttttttttttttttttgagatggagttttgctcctgttgcccaggctggagtgcaatggcgcgatctcagctcactgcaacctctgccttctgggttcaatctattctgcctggaaaatcttaaaccactaggtgaaagacaactaccttgtcacctgtggggcactggtgaaaacctattgcaagtggagaaggtgaccaagagaaaacaaacaaacaaacaaacaaacccctctgacttcatgggagtggcaggaataagtcctgggccctgacctgcacctgagtgccagacaggatccccgagaaggctctacacccatgactcagggaagcagtgcttgcttaagactgagatttaatcagagtcatagagaagccaccatcatactatgcccctgataccaagctaatgactgttgagtaacaagtaataatgtcctaatgttatagtctagtaaataatcatcaggatgtgtaatgcagaaaatataaatgaatggatttcccaagatggaaaatgtgaggtgtttttgtggcttttatgtggagatattgccttgtatttgagaggtctaatcactagtctcactgctattaataaccagtgctgacatgctggtacaatctgcctccaaatctccatggacaggcacatggttacaaagcaagatgattagtagcattattaatagaatttcagtgtatttcatgctatgtgcacatacagggacttgagcaacacataaatgagaattattgtagaagcctgttgggattaaaccttacagcataggagaaaaaaggaagaagggttttaaaacaatgacaagctaagaaacacatggataaaacctggaaacctgaacacaggaagaattttcatcctaatgagaacataccagatatatttttataataaaaactctccatttttaaagtaaggaaagtgagagggtacgttaaagggaaaaaagcataattgtcaagtccttttgtatattcaaactttataaatcaaaagaaactcttaaaattgtctagccccttctctcaaatgacaacaatggagagatatcaggttgatctaaaatctccctgtgatacagggcagggaagccacaaaatcgtggcttagccagggaaagttcttggctttgcccaggaaagctttcaagagtgagcaggtggtggaagaaaacagcttcactggggcagcagcattacagcacagtgactgctcctgcagagcaggctgccccgtaggtggtgtgtggagagcagcagctcaagctcagtgctgcagccaaactctatctacctttaattacgtgtaaattaagagatgagttattcagaaattatagaaaaggggtggtaatttctggattgttgccatggaaatgggctgtaacttctgggtgtttttatggcaatggtaaactgtccgaatgaagggggacatattttaggaagaggtaatttctgtgcctcttccctgtttcagccagtcttcagtctggtccagagtcaagtcctgcctcctacctcaccttcacttaataagtattaggaaacaatgacatattttccttactatgtaaaggcaaattataatatttaaatacagagcagagctgagaaatagagcaaataaatatataaattttgtaaaaatatagcaccttctgataatcttatagtaaaggaaaatgtaataaaaattagcacctatgagcagaaaattttacagtataattgcagcattagactggataattatatagatataaatgtaatatttgaattaaatatgcatataaatgaccacatttttatttggaaaatgctacagaagtgttttgaatgtaaaattctaaggattatagccctgcttaattcagtcagagaattcaaaacagagggaaatatagtttatttattaatttttaaattttttgttcattattttgtgagaaacaccttaatacatgataagaatagaaaaagaatgtctatcttccatatcacagaataagaaaatatcaagcaaaataatatattatctatatggctagcagaagaaagtaaaacgataaaagacattaaatggtgcagagatgttaatagattcaactagtccaaacttcatattttaaaggcaagagcatttacattgtgtcaaaaaagttataaatatttatttcttatacactatttaaataacctaatataaacaaaatgctggaaacaaagaatgaccaaatatatgtcactcaaaagtgaaacaaatgtttatcaaaatgaggaaaaaatataggatataatttattagtaataaaaacatgaactgaagcaaaaggagtaatctactttatctgcaagttataggtactatttaaatgagaaacatttatttataagcacaaatatatgtagcatcaaaatatgtaaatcaggaaagtttataattaggaagtattgataaaaacaaatgatataatattttagagcatgtgcgaattatatagttaagaaaaacaacaaacattatggggtttgacctaaggtaacttaaaaaccacttagtggaatagcttttttgaaaagcagatggatccactgatatataattttaaaataatttttaaatagttggatagccatcaaattcatttaggaggcttgtattagatttttaatcttgacaaatattccagaaattttaaaaaagtaataataaagtaaattatctcatgttagtatatgtaaaaatcctaacgaaattaagtggttgttatagactgaatacctatcttgtgttcacccaaaattcatatgatgaattctaatgctccagtgtgttggcattagaagatgggtcctttgggagataattaggtcaagagggtggaaccctcatgaataagattaatactcataaaaggaacccccaaaatgcggtcttgcttttgctgccacatgagggtaaatcggcagattgtaacccagaagagaaccctcaccaaaacatgaccactctgacaccttgatcttggtcttccagcctccagaactatgaataataaatttctgttgtttataagccaccagtctatgctattctgttatagcagcccaaactaagatatgtgatgcaaagattactctggcaaaactgattgaggtttaactaatgaattattcattagtaaaggagtactaataatgcccagatagatgaacatttaaataacattgaaagtaatgctgaaatgtaacataaaatcttagtattcaagtgtctacataaaatttaaccttagctaaaagtagaaatatactaagaaaaagatgaagtaaaaattaaaattaaaatatctattattttctcttagtagagattttgctcattcattttaattattgctcaattcaaattatttttaaaatacttatatgtaaaatagtaaagagaataacaatatgttcaaaactaaaagcaacacactgtgggtgaattaagcagcaaaaccatccacatatgaaaggtagtctttgatatatccctggactccatgtactgtttatggtttgtacatttttgtttgccagtaaagcgcctgggcagtattagacaagaacaaccaggagttcagttattttactgtacacaacaaaatgctaataatgccaggactctgcaaaggcaattcttgctaaaaggtcattgtcagcaagcatcgttgaacttctgttgatcttcattccagagattaattgtgcttgattgcatataatattattttcattggaacaactgatgttgactgagagagtgaggtctgatctccctgggattactcaaaggattttggaacacagcatttattcttgtcttcctttaatctagtgaccttgttgacatgatctgttagggtagttgtttcaataattctatatttattctgttattttgaaaatgtttcttctctgttttttaattcaattcacagaaaaactcagaaatcatgatatttattacatgtttcctcctcatattttcaaatttaaaaaaaagcagaaaacaagagcaatagcaacaaaaaaacaccgcttgagtcaaactttcctactaaagtatcattctcgttttatgatttaagtagtttagataaaataaacacgagcatttgatgtattgtagtcaatatgcttaatgccattttctttctcagaaagttgtagagtaggttttcaaggagaacttttaaagtctctattttaatttttttgttctaaaaaacctgtaaataaaactgaataaataaataaataaaattatgtctgtttttgcataatattttttctattgttaagatgctctagactgaattacgtatcctgaaattctattttgaaattttagcccccaacaatttggatataaggcttttatgatgttataaaagtgcccccctaatctaacaggactagtggctttataaaaggtggaagaaagagagttatctttctttctccatgatcatgtaccaggaaggtagccatttgcaagccagaaggggagttcttgccagaactcaactatactagcatcctgacctcggacttccagcctgcagaactgtgagaaaatacatttctattgtttaagtcaccctttctatggtatgtttttatgacaacctgaataagatgtaagagattaacaaaacattttttactcttatcatctgtggtacagagacatgtaattaaaagacattgcaatggaatatattgtttaattagatagcatataactggaaagtatacattattggaaggtattaccagaaagcaacttggtacttaatttgttcaaaattcaaatataaaatctattttcctgttgttgtctgtggagaagaatcataccatacaaatgtttctcaggaaaaatatatactgtactctttttaaaagattatttgtttctgaagcctacttctaaacttcccaactctttggggtttctttctgtactgttttgcagttgttttcatgatacattatgtacctatttctaaaactattgataggagtttccagagatcagggagttgtaggtattaatacatttcccacctctcttggtgcccagttcaggactcgttatctcatgggtgcttggtccatactgctgatgtctgtaataactcaacatgaaaattaatgtttcattctcttttcctgattttccatgagaaatggcctcaaaagtcctgagctaattgtttctacgttctaacttgtaatgtatttggaatgttgagtttagagtaagtcttcctctgattacctcatgtgaacacttaaatcttttttgggttgttccaaatgagtcttcaaatatgaaccttttcaattatttattaaaaatcatcttgcttcccataatatattgatttttaataaataattgaaaaggttcatatttgaagacttatttggaacatatacatatatattattttgttctctttttgtcagttatatacaatttctgtcattttggaatttttgccattttggaagctcactgggtatacttacactggtcctgatcataagtcatgtgtaatgtcagtgaaagcacccactataataacaaaaaaaaagacaagaatccttctgtggagtatctctaagcagcattcactgacttaatagaatgccagaaatgcaaaatccttaaattgttaaaataagacttggcgatttgtcttttccccattaggcttaatgcattttggaagtcgatgattagaatgaggaagggaactcacactgtaatagctaagcctgatgaataaactcacatgatcatcattaatatcaagccactggtgactgagacttctgtacatgcataattattattcttggctgggagaaggtagagaaggctgtaggagctacctcctcatttgattgtcacattccctgaaatgccttagcctgtaaatcacactttcttctagacaagaacaccttttaaatccaccaatcatttttttttttactttagatttctagtctgtatttcattaggcatatttcccacactttttgtagattttgtgagacttgtttaaaagactttactaaggagaaaagtcttattctggaagaatcatttactttccttgttctatttatagcacacaggatttgacaaacaggtactttttaattccatccctaaggttgaatttccctttatgtttcatgaataagggaactcaatagaagaaagcaacttacccgttgtagaaatggcatgaaaataacaaatggaatcaccctcccacatttccatttacttttactcttctaaaataaagtttcttaacactcaatgttgacattgagtttttcttctgggaggctgtcctgagcattgtaggatggttagaagtatccctggcctctacctactagattctagtagcatccccatgctcccagtggtgactgtcaagaatgctttcagacattccccactgctgttattgcagcatctgttaaaaaccacatatttgtgccaaatagattaaactatcttcttcccagtaaacatactcttcctcgaggacattgtctttcaaagtccagtctctattgttacaaataatatttaagtgatcatgagaactatttctggtattttattttattttttactatgtctgtgtgagtgtgtgttttgcttgttttacttgtttttttggtttagttttattttggggttggcctagatacagaagagataaatacatattaacaatgcaaactcaataaattctcagtgacaaatttcacactatgcttgattatattgttaatattttcactgagactaaaggccattaatatgaatggctagagcattgttgaaggagacagtgagtttaaaattttgttttaaacaactgaccagcattccttcctgaccatggaagataagcagtaagggtttttgtgtccttggcttcactttttgataacacattacctctgaacacattaaacaagtgcaggaaaatggcctcattaaacatgacttgctatttaccaaccataagtgcacacacatacaaacacaaacacacacactcacacatacaccaagcataggcctagagaaataggtctggttataaaagtatgacagtgattcttatcaattctctttgcaaatctacactcacattgttcttactaacattcccacacatttggctggtatttatttcttatcaaaacgatcaaacaaccttctatgattttgggggtttagataagaaaatacagcttatatttgttccatcaggaaaagatttaattgaggaaaagagtggaacacacaatcactgatggaaaagggatcctaaagccaacaatgacgtcctcagagtgcaacactaaaagggtgatacttaacaattattctagaaggtgctgcaaaactcagatatgtctaggcatttactcctgactatctcagcatgcaacactagcatagataactcttaagatgcttgacaagtcattgaattgattttcacataaattatttgctcatgcgtacacacataacagcctccctagaataatggtctctctcactcttttatcttctaaatcttgagtgaatgcctctaatggtagagtcttaccaggaagcatataagaaaggtgatctgggaaattgagacatcaacttttcctatgagattcagaagagaatttagaaggagatgttaatgctgagtttaggacagactctatagtgaagttgtccctattgtcaaatcatgatccaccaattttaaacctctgaataagaataaaaatcaatcttgctgctctatctagtatgagaacactatttattagtcaattaaaacatgctcatctctctagagagaaaacatagttactgaaatctcttattcatctctaggctatgatcattccttttatagctgaatcctaaatctcattaggtatcctgtgactcaaatagtaaattatagacttttgtaaacggaattcactctgaaaccaggtctcaacaattatttgagaggtgattccaaaaagtcttggtaaatagagacagggaagaaagaagagctggttgatcctgtgttattaagctgaccattgtggtaggcaactggaattcagtcccactgagaatcttctgaacaaccacatagcatgtgcctcagaattatccctttggaggagagaaaacagaaatatttattcagtgacacctgtcctacactagttgacagctatttccagagagtgttagttaactcttagcaaattccagtaacattgtgtgctggggtggggatgggggagagccctggaagaaaagtgagagaatgagaggagcttgaagtgaagcactattggtgcgcactaggaccccctctctcagctggagatgaagtcagaggtgggctgaggatgcagagcacaggaccctaaaagcctctgctactgctgatcccctgtactactgccctgtcaggctccacattaattccattttctcactcttcagtggagctgccagtaacaatctgtaaagcagacttatgggttagtgaaataggaacctgctgcagtggatcctgaaaatcagtatgtatcaacaggacagaaaatatgtgaaaaatcagctttctaccatgtggttggctgatcaccttgagtaatcctaccatctctcaggctcaatgtcagattctgttgctgacacagtgggcattcagcagtggcattccaaatgtatgctccttaaaagataacagcagactattggatccatgcctagcctctatcttggccactaagtctaccctattagtgaaccatttcacaagcagttgtgtgaacttattttaacatattttgaagggcatgtatgctgatgattaataaccttagtttttgtttgagaaattttttatgtctttttcatttctgaaagataatttcactagatatggaattttagggtttttttggtttatttcaacagtttaaatatatatatatatatatatatatatatatatattttttttttttttttttttttttttagacagagtcttactctgttgcacaggctggagtgcagtggtacaatctcagctcactgcagcctccacttcccagattcaagtgattctcctgccccagcctcctgagtagctgggactacatgtgcccaccaccacacaaggctaatttttgtattttttagtagagatggggtttcaccaagttggtcaggctggtcttgaactcctgacctgtgatccacccacctcagcctcccagagtactgggattataggcgtgaaccaccgtgcccggcccaatacagcatttttactgtaccttttctatatttcaatatgtttagatacacaaatacgtaccattgtgttacaattgcttacagtgttccatacagtaacaaactacatcggtttgtaatgtagaaatcatagtgtatgacatatagcctaggtgtgtaataggctatgtcatcgagatttgtgtaagtatactctttgatgtttgcacaatgatgaaatcacctaaccatgcgtttatcagaactcatccctgaccctaagtgacgcatgactgtattatgaagaacaaaattaaatttgaattttcaaaattagttggaaagatcagggatgatatattgaaaagtattgaaaattaaatttacagctcagaattttaatgccttgttaatatttttgaaggtctgcttcaaaaaatcaaaaaatatttcaaaaaaattatatattcataagattaatatgtttctataactgcaggacagcattcttgtttctttattaaaggaaaattattttaaattattactaacatggacacattctatgtaagttgaatgtacagtaattttatacagttaaatgtattttgctatccagatagataatttcataacttggtattttatttcctatattgtatagattaattatatagtatacataattttttttgctttaaccctgcaataattgagcaactcataataaaagaaattgtgaattatttgatgtagaattttacaagaaatatctaaaaacgttgggtattaatgttattaattataaactgataaattatgttttatatatagatattagagataacaaattacaacttttagacactctaaataatactggggaaaatataccattaaagtaagaaaatactgaatttcattccaattaggatcatgtactaccttttggcattttccactgtaccctaatgtcaagagacctaatatttcaaggatgtattcaacaaatatactgatgctataatattatttagcagagatttcttagattgctatgtggattagaaaatttaatgtatattttaaaacacctgtgtgtcacatgtaagaagacctccatttattttagctcatagagataactatatacattatatatgcattatagatcacacatatgccatacacacatgcacacacacatacacacacactctaacaaagcctaaaacatgtagcaaaatttataaatatgttggactaaaatgtctatatgtcattgcaattaaggaattgagacagtcttctactttttcttaggaaaaagaaaagatatttattaggaattatgcatatcatgattttgttgattattagtcaggataaatgaagggattaaacaaattcattttattttcatgttttgcagaatgtttatgttggtgaattagtggatgaaatagacctctattcagcaaataatcttatgtatcttctatttttaaaaattatttatcatttttgttgatacataattgtgcatatttatggggaacatacaatattttgatgcatacatatgatgtgtaatgatcaaatcagactgtttggaatatccattacctcaaacatttatcattttttttgcgttgagaacagctagattcttctagctattttgaaaaatacaataaataattgttaactatggtcacgctactgtgctatcagacactagaacttattctatctgtttaactgcatgtttgtgcccattatccaaacttttttatcctgccccccaccctctttcccccactgtggtaactatcattctaccttttacctctgagatcaacgtttatagctctcaatatgagtcagaacatgtaatgtttgtcttttctgtgcctgccttttttcacttaacacaatcaccttcagttccattcaggttgctgcacatgacaggatttcattcatttttatggccaaatcatattccattgtatttatacacaacattttctttatccattcatccactggtggacacttaggttgattccatcttgggttttgtgaatagtgctgcaataaacgtaggggtgcaggcatccctttgatgtaccgatattccttcctttaaataaatacccactactgggattgctggatcatatggtaggtccatttttagtcttctgagaatcttccatactgtttttaataatgtgtggaggaaattcttaaataaagaaacctcaagctgggcatgatgttgcatgcctgtaattccaggtactgtggccagaggatctcttgaagagcccaggagtttgagtccaacctggcaatatagtgagtttctgtttttttttttttttgtatttggattttttaaatttttttttgttatactttaagttctagggtacatgtgcacaacgtgcaggtttgttacatatgtatacatgtgccatgttggtgtgctgcacccattaactcgtcatttacattaggtgtatctcctaatgctatccctcccctcccccgcacaacaggccccggtgagtgatgttccccttcctatgtccaggtgttctcattgttcaattccgacctatgagtgacaacatgcggtgtttggttttttgtccttgcaatagtttgctgagaatgatggtttccagcttcaaccatgtccctacaaaggacatgagctcatccttttttatggctgcatagtattccatggtgtatatgtgccacattttcttaatccagtctatcattgatgaacatttgggttggttccaagtctttgctattgtgaatagtgccgcaataaacatatgtgtgcatgtgtctttatagcagcatgatttataatccttggatatatacccagtaatgggatggctgggtcaaatggtatttctagttctagatccttaaggaatcgccacactgtcttccacaatggttgaactagtttacagtcctaccaacagtgtaaaagtgttcctatttctccatatcctctccagcacctgttgtttcctgactttttaatgatctccattctaattggtgtgagatggtatttcattgtggttttgatttgcatttctctgatggccagtgatgatgagcttcttcatgtgtcttttggctgcataaatgtcttcttttgaagtgtctgttcgtatccttcgcccgctttttgatggggttgtttgtttttttcttgtaaatttgtttaagttcattgtagattctggatattagccctttgtcagatgagtagattacaaaaattttctcccattctgtaggttgcctgttcactctgatggtagtttcttttgctgtgcagaagttctttagtttaattagatcccatttgtcaatgttggcttttgttgccattgcttttggtgttttagacatgaagtccttgcccatgcctatgtcctgaatggtattgcctaggttttcttctagggtttttatggttttgggtctaacatttaagtctttaatccatcttgaattaatttttctttctatttctaaaaaaaaatttaaaaatcttattcaaaatttcaggagttgacttcaattccagaagtttggatagctttaagactgacatattaacaagattattgcccccctagtggttccaaatttgcctgggagtagtttgatagtgatgcaccatttcagaaaggatgagggaagtgtattagaaaggagatttctagtggtgagtttggattttttctcacatgcaaaacaatgaaactttagtaaaatttgtaaaagcaaaaaatagaaagactctgacttttttcagtgatgtgcctctacctaattagctcaattgcatcattttttattccccaggaaataattgttctggacatttcctctccaaccactctaagatctttcatttcactatgtaattcttgtttcaataacatatattaatatgttaataatatttctgcaatttttaatctcttatgataatgtcatagatcaaaacagctcatgcaatattacttgttactgattgccttgggtattttaatagtgtcttaacacttgaaataaaacaaaaattaggatatctttaatcacatgcccactccttttctcttttcatctccatgcctctcttttctcatcttattattatattcttatccagtcagtacaacttcagatcttgtgctgctcatcaccacatccactcagaaatacaaagtattgatatgttctcattaaagtctcagtcctgtttaactcatcagtgtaagcatatagttgtgtctcggactggttgtcacaccacacactgtgttataaacaggcacagaaggtgctcagtctttgcccattaaccttgggaatggctatttgttgcatccaagaaggctctatgtatgtctacactttgtttgatagggtgattgtaagaggattacaagttacataagcaggcagaataatctcctaattagagatagggctagaaatcaattcctctttgtacaacataatgacaatgccttttaaacatttaaaggttctttctgagcagtagatcttgtcactattgctcattaacttctcagccaatgttatgtgggtcatggtagctttgtgtacattgcaaatattacaagtcagtcacatttaaatttactgtctattttaagatttgaaaatgttgcttgattctagtcaaagaaagcaatacataacatttgcaacaaaagagcttatggaaaaaaagacatcattaacctgtgagatctatgttagtcagagtttcatctctatttacatacagatgcagtgtacacacatacacacagatactcttcctctgtttattaaaactttcatgtaatagtggctggcacaataacataaaattattcctatgaaataacatacttttatttatttttcctgatttttaaaaatgaacaaaacaagttgttagtccatttctatagaattagcttcccaaatgaagaattcattcaaaattgtttgaaggacttgaataattattgattcactgaacacaatgacatataatatctatgcacaaatgcaagtttcacacataggcaatgggaaaaccattagttttaaaaatgtttctgtattttctccacagagctagagattgtattactttcattcattcttcattttctttcaaataaacattataccatgtggttagctggaaatgtacttaaaatgtctataaagcctgagacaaatttcatttcagaaataaaagcatatatggaggaaataggatgggattatttgggaagtaactcattgaatcactaattaactctacatagaaacactgatgttagaaaaaggaagaaggaaagaaagaaatatgttcgtgagatctattgtagagtttcctttgtaattaaagaatcaattaacaaatataaaatacaatatctttgaacttattaataattaactttctggcccacagatttaatagttaagtttttctaataatggcaggtggaagataaatgaataacaatcttagttctttgctggagttcaatacaatagtcagatataccacacatgtataagtataatcacatgcatatttgcaagtttacccaataatatacaattatatatgtttgactctatgtgtcagtatttatataacttctagcaccatagaactgtgcattttcataaagatacagttttcttctggaaacaaatcctagtattttaattttggctatcatattaaaaattaaacaatacagaggcaataattctcaagatgttttagttcctgtataagcgatcatcttcactttatatgtttgggatagcaaagataaaattttcatgaatgctatatatcttacacttctttcttctttatacttgctctgcaaaaaggcaaacttttctataaaggcaccagatattctataaatgtgacagatatttgaattactaaataaattgcatacccaataaaattagtctatatatacaccctcaataactatgaaacaaaatttgaaatagaccttcttttaccctgatttaatttatttattcgtttaatttttggtcttccagaatattgggtacattcttaaaacaggtggaatggggaatggagacaagtatcaggagggcggatcacaaagtcagaagttcaagaccagcctggccaatatggtgaaatctccatctctactaaaaatacacacacacacacacaaaattagctgggtgtggtggcgggtgcctgtaatcccagctacttgggaggctgaggcaggagaattgcttgaacctgggaggcggaggttgcactgagccaagatcacgccactgcactccagtctgggcgacacagtgagcctccgtctcagaaagaaagggttaatgtcttattaagaaataactgcatgactttctcattttagcctttgtaaaaagaaagctgaacattcattagaatgaaggactgtaaagaatgctgtcagttttagccctcaagacatattttgaaggtatttgtaagaaaatgggaaaagcatctctctccttctttatctgaatactgctgagttaaacatcatgtgggttgtatgtactgttacaagaacctagacacttggtagggcactgaagagctttgggaaaccctcacaagtcctcaggaatttgggaagaatagagacttctgtctgcttttcacctgcttctcaaaaacgtacacagcaggagatcctaattttgattatgttccctgatgaagctgtgctcagagagcacaaaaccagtgaagtgatgtttttactttcttctcctgccttctctctcctcctctgagcctgaagtgtccatagccagcaggatcgaaaggtgacggggtggaagatgagtaatgagaacatctcattgcccaactccccgtccaaattgtgcaccaggcctgacctgcaggatgggagaacttagaatcgagtgcaaattagttttggtttagattggattggtctttcatactgaacatgaagccaaacctaagctaaaaggttacagaaaactatttattatgtaagatatgtacaccaaggatggaaaatggaattctgacaaaacatttgtaaagaccatggtgggataaaaatggtaaaaagcataattatcagattgtttattagtgatccccacacattaagtaaattgcctctgcctaaaagtagttaggtttcaggaaaactcttctactcagaatacagagaggcaagagcagagactcaacgctgttcgtgtgaagaatatgggacttttccccaacagcaatcatttacctatcacttttttctcgttgccaaaaatctaataattgaatattgtttggggaaagtatttcatagaaaatcttcatgaagacacaaatgtagatgtgtacactactattactatgtagtcctaaattattaactatgacaggtgccttaaaattactagctttctccaaaaaaatactttacactgtcaaggaaggtttttgaataacaagttctataaatctgaaaaccaaagacaattatcattacatcacggaatgccagatgtaataggctaatcagaagaaggctgatcctcctaagaaatttccagttcctcccaattaagccacacacctagatgaacatatgtgatgtagagtggctgaaggaggggagatttttagaaaagaaaaaactgggcaacaatatttaaggttaataaagatttgattatattctattatattttatatttgtagtgactcatatgagcataaaaacacatataaaaaattgattgacttggccgggcacggtagctcacacctgtaatctgagcactttgggaggccgaggcaggctcagatcatgaggtcaagagatcgaaaccatcttggctaacatgttgaaaccccgtctctactaaaaatacaaaaaaaaaattaactgggcatggtggcaggcgcctgtggtcccagctactcaggagactgaggcaggagaatggcatggacccaggaggcggagcttgcagtgagccgagttcgtgccactgcattccagcctgggtgacagagcaagactccgtctcagaaaaaaaaaaaattgattgacttaatagacacatacaattcaaatgcctatgaaataagagaaaggaatttccttaatctattgaacattaaaacaaatgaaccaaaagcataaaaacatcatactcagtggtatggtgccaattgctatgaattcagttccaccctgaactaaatagcaaccagtacataattatcagaaaatttaaaatgacacataatttgcagaaaagacaaaaaggttgccaacattttaagataatataccaaaatatctatatttttattcatttattaaagtaaaaaagtttgtcaatgtgcagaaatcaaaggcacattatagattagcaatgtagctatgtacttttaagaatattccatttaaactatcatcaaagtatgacatctataggaataaatacaactaaagttgtctaaaatcttaacggtaaaaattttaagacttcgaagaaatttataagatatatttttaataacaatgatacctataaatttaatttaatgttcagaatacgtaagaattacaatgagccactaagaaaaaacatttgcaaaaaaagagcaaaatatatcaactagaatttcattcgtgaagaagcatgttattatgtagaagaatacaaattaaattgcagagatacaattttataatcatcaccaaaaggatggagaagtagaagagaaggaggaagaggaagaggaagaggagggcaggaagatgaggaagagaaggaagagaaggtagaaaataaaagaaaaaaaggatattaccagtatttgttatcatgaagaagtattactcagtagaaccacttataactggttggcatcacctattaaagtataacatgactgagtgcatcctacaaccgagaaaatgtcttgctaagtatatattctagagaaactcatcttcatttataaagaagggtttttttaattaaaaatattcaagtttcaaccttgcatcagaaactgatcaagatattaaaaatgcaacagtgagcaaaatgcagttctctggtttcttggagttttaattccattgggagaaataaatattaacatacctatataaaatacttcagaccaggcacagtggttcatgcctgtaatcccagcacttcgggaggccgaggcgggcagatcacgaggtcaggagtttgagaccagcctgaccaacatggtgaaacctcgtctctactaaaaatacaaaaattagctgtgcgtggtggtgggtgcctgtaatcccagctactcgagaggccgaggcaggagaatcgcttaaacccggagatggaggttgcagtgagcgaagatcgtgccactgcactccagcctgggtgacagagccagactctgtttcaaacaaacaacccaaaaaacccacaaaatacttcagatgttgataagaaaaggaaaacagtcagggcaggcaataagtagtggaaattgacctgagacattttccccagaaatgacaatttgggaaaaaggtttaaatgaggtaaaggagacagctctgcatatttgaggatgaggatttcaggcataggaaacagcatgtgcaaagaacaggcgacatgaatgcctgaaaattttgaggaacagcatgtccggaattttgacagtagctggtttttctgaaagaaaaatatgaaaacatctctcatttacattactagtgaaatgaataaattatgctacatttgtgaaaaataatattctttttttttaatcatactttaagttttagggtacatgtgcacaatgtgcaggtttgttacatatgtatacatgtgccatgttggtgtgctgcacccattaactcatcatttaatattaggtatatctcctaatgctgtccctcccccctccccccaccccacaacaggccccggtgtgtgatgttccccttcctgtgtccatgggttctcattgttcaattcccacctatcagtgagaacatacagtgttcaggttttgtccttgcgatagtttgctgagaatgatggtttccagcttcatccatgtccctacaaaggacatcaactcatcattttttatggctgcatagtattccatggtgtatatgtgccacattttcttaatccagtctatcattgttggacatttggctaggttccaagtctttgctatcgtgagtagtgctgcaataaacatatgtgtgcatgtgtctttatagcagcatgatttataatcctttgggtatatacccagtaatgggatggctgggtcaaatggtatttctagttctagatccctgaggaattgccacactgtcttccacaatggttgaactagtttacagtccaccaacagtgtaaaagtattcctatttctccacatcctctccagcacctgttgtttcctgactttttaatgattgccattctaactggtgtgagatggtatctcattgtggttttgatttgcatgatcaggaatgtaatgttctgattccattttttaaatctgacagctgacagcttttaattcccactcttttctcttctctgctttctataactatgaaaacaaataagaaaacctgattactttcttctttggtgccaattagaatctctgtcctatgcagacaccagatcagccatgggaaccctcactgtgctctcatactccaaccacaacaacagacaatgccaattcttgtctttcaacccagttttagaccttgctctttcgacccagttttagacctgcttgttagctctcttgctcttctagaaagccttattatttgagcgtaaacatttacataccctgttggcatatgtgtggcacctcagcaactgcggtggattttatatggggaatcccatcttgcctccatatagagaccacaagacaactgccacaaagcagtgtgtgcaggtgatgatgatcagtactgatagggtgtttgtcttatcttgctttggcttcctaaatggtgtgtaaccttctgtctgcatactttttttttttctcttttaagttggagtctcgctctctcacccatgctggagtgcaatggtgcaatcttggctcactgcaaccatcgcctcccgggttcaagcgattctcatgtctcagcctcctgagtagctgggactacagccatgtgccaacactcccggctaatctttgtatttttagtagagatggggtttcaccatgttggccaggctggtgttgaactcctagcctcaggtgatctgcccaccttggccacccaaagtgctgggattacaggcgtgagccaccgtgcctgtctcctgcataatctttgagttgtgttgctgcctacaggcaaagttgcactttgagttgagcttctttgtgctgcatttgctgagttctgccatgcttctgttatagacttaactgaccaatatcagaagtatccttactggcatctgaagaaaggattaagaaattgggaccttccttaaaggggccttggctcctgcatcataacctgcatttatctgtatttcagattaaggcatgtgtcttgattctgtctagttttttcagccttctataaaaaataccaaaaactgagaaggttataaacaaaagaaatttccttctcatagttctgaagtctgggaagttcatgaacaagttgctggcagattcaatgcctggtgagggcctgctttctcgttcactgatggtcatcttcaccttgcgttctcacatgatggacagggctagctagctctctggggcctcttttatgtgggcactactaccattcatgagagcactgccctcacaatctaatcatctctcaaatgccatcatctcctaatgttatcaccttgggaattaatattttagcagatgaattttgggagaacacatatattcagacaataacatcactatatgtagtaagcttaggataaagatttgcccggggactgtcggttttatgtcttaatcaggctatgatttccatcctatagagcacttctgggaaagactgatgccgtgtgcaatatatgggttcaccaggtggccactcctgtggagaaagaatagtcactatttggtatattgggcccacattcataaaagcaaagggctcactagtacctcacaaatgcctttgctgctgttgttgcctgtgtcccttcattaaagaaggtagtgattcttggagctacaggaaaaaagtccaagacacctccctggcacaggcaaggtattaattttaaactgtgttaagcccaagtccttaatctcaataaagctaccatcaccacggaagaggcctctaactaactcctgtgaggcttatttgaaattctaggcaaaaggtagtgtataaatataagaaaggtagaggaaactcagtcaaacccctattgcatatccagtaaccatcaaaaaacaaaaacaatgaaaaacttgaataaagaagacaaacaaataaaaactaaatcagacatctgcaatttgacacaattagaaatccagaatttactaaaataatttatgtaagaagaaaaataaaaggactttgatgatttttgtactgctacaagaaaggaaacttgattaactttagcagatgctaaaatgtaccaatcagaaaaatttaatgacctttatcaacactaggtctcaaattacagttacatctgggaatcgaaataattttaaacaagatatcctgtttaatctagggggaattaccaatgaaaacagaagaaaacaagtacacctcaccagagctactgcactgcccaagttccccatagtcatagcgcccattgccctaaaatattccatcaaagacagaaactcttaccatacaagccaaaacttaaatattcataaacagtaactaaataaaattagttagtaatgaaattaagttaaattaaattgcatttaaatctctagtccttaaaatgctattgacataatgagacttattccgtccccaccagttaaaatagttaataccgcttagtataaataaaaacatgacctttaagaatagaactcggcctctctagcatatcccatatgcaagaaatgttggcctcctcctctccccattcctttgccagatgccatggtgctggatgaagttatccctctcccagaccccttggctacctgggcagctccttgtgatcaactgagtaaatagcacagagcatttctaaattgtatagatggcagcaccacgttacatatgatgaagtccccaggagcgttcttgccatctacctttcaatcatgatatcacagatcaaagacacacaaaaagtcagcacaaatggcctggctttgggcattcattcctagcactggatgccctggccaacaacagccccatctgcacatttttacagattattgagctattgccactattctggtcatctgatccagcatatggccaaagcaacaattctttatccaaggtttctctatttgtggtaaagaacatatggggtaaacaatataaaccacagttctctatgtctctgtacatagtaaagccacaatacaagttcttatcaaggcatttataccctttggatttcaagatagctttcatagtggccaaggtacatctcacttctcaaaaatgcgcagtgctgggatcctggacaaagcattcagtgaaactaaactttcttactggcctaggctacagctctcatagaatgtcaggcatatagcttacaaagacaaattttaatgtttcaagtcccactcctccttcttcgcctgtatctaagcaagacaaaaatagagcccagctgcttcctcctttggtaccagcaagaagtttaaataatgcaagtcactggcccaaacaggaactctcaccctggccccacctctaatcataatactaataattaaagccagtttctactcttttctctctcaagtcattttcagaccttcagggaagcctcacttgctctttcccaaaaaactcattttaagtgtagtaaaactttccatgctattttggggaatgtgtatatatataaattatgaattaatgcaattaaaattaatataaattcaaaaaagtggtcacatgggcagtgaggactgcatattatcagaaaatggcatgcagaagatattgagaacgttggaaatgttgtatttcttaatccatggtgctcacatttgtaaccatcattttttcctttaagctttctcataggttttaacatttatattcaattgcagaataccaaatagagtaatataatcaatagtgtagttattgaaaaatagaaatgaaaaactgagtttgaagcaaaggcaggtatcaaacatttgaaaaaaagttttaaatatttaaaccggtagcgatttttcataaaaattaagtctctaccgtaataaaaataataactaatggaaaattgttatcatgtgatctaaaattatttctcatcttatttttatcttatggcaatattaacttaggcactgaaaaattcaaaaactaaagcaaaccaaaatatgttcatgtacttgggagaacaatttaaatcaaatactagtggcctgtttttttattgtaatcaattcagatgataatttttatatacttcaaatttatggttaaatgtcactaacatattatggatttaatatctttaaaaattcgttttaaagtcagaggtcataggtaatattcctgttgttaaataatatctatgaccctcagttttcccacagataaaagaaggataatagaactgttgaaagagggttgctataaggaataaaagaggtaataaaactgaaaatgacattcgcagggtctaacttacataagatactcaataatttttggcataatttaagaatcctctgagaataagaaaatatttcacttctcaatgaaacattagaagaatggcttttgtctcttgaacaccgacataaaatcatactgctaattaattggccatcgagactaatcagaaggaacagtatgataagtttggtcagtgaatgctcaggaagcaatcacatcagaatgataaatgcatctatagttctcgggaacataaatttattttcaggagtggctcagtgacaaaggattgactcctagttctgataaaattgttaactcaagttaccatactatttttatttaagaaatactgatttcagccctcttgatacactgatttttccaatgtcattgctgattcatgtttaattatactacccctccctttttttttttttggacctttccatatccatttatatgatttgcctgatttctataaaacagatcaggatatgaagaagaaaacaataaaaaaatcatgtctagcaagaacagaggtcacctccaatggagacacttcaggaattgctcgggaaagaacatcaagtggtcaaacaggaggatatatgtggttcaagctacagaaacagcaacaggctgagcagccaacataaggtaagaactgattccaggatgggtgactctgctatgtgttgcctgatccggatacattttaaattgaactccatcattttttgaggccctctgggaaacgtatccattgaaaacagtcgacaccagggtctacttgaatggggctgggggaggtgggatgagggagaggagcagaaaagacaactactgggtactgggcttaataactgggtgatgaaataatatgtacaacaaatctcatgacacatattttcccatttaacaaacctgcacatgcacctccaaaccaaaaataaaaataaaaataaatgaataacaacaccacaaagaccagcaggattccagcctgatactgtaatgtattttggattcttaactcgatcctaaaataggaaatttgtgcattgctagtgacagaaagaatattatttgcaagatttattggcaactttgcatttattctcgaaggcagtggttcccaacctttttggcaccagggaccagtttcatggaagacaatttttcacagatgggggaaggtgggaggatggttttggtattattcaagctattacatttatcattaaattctcataaggacaacacagcctagatccctcccatgcacagttcacagtggggttggcattcctatgagaacctaatgctacggctgatctgacaggaggcagagctcaggtggccatgcttgcttgcccctggctcactttctgttgtgcagccagtgcctcaaatgccatgggccagtataaacacagaagatgggaacacctgctctaaggcctaacttagaatattttttgtaatttctatccctctagtatagccacaattcccaaatgggctttcaaaagcgtgtaaaaaaatattatttggaagttttaatggggaaaaataactgaatacagatgaatctgcaaaagaaaaactatgaatgttatggaacctcctttattaaatctatctatctatctatgtatctatctatcaactgtctatcatctgtctatttatcatctatctatctcagctgtctttcacttggatgatgctaattattgtttatttagctattttccagttctacttgtgaaaagaaataggaagagacaatactaatctagaatagtctatgaaagttaactttagatgaaagtacacttacaataaatgctttaagtcaaaaggaactaataaattgcccatctttaaaaagtgtctaatatcacgggacaattccatgaaaatttctctgaaaatttgttaagatctttacatttgtttcagtgcaatgcccagtgttatgagagagattactaataaactagatataaagagggaaacagcctaatgcctctaaaaatgatagtgctactatacatacattttaatgtcttctttttgtgtacgaaatgagtatttgttttagtgagaaataaagttattaaatgctggaactggcctctggaaaatttggctgctgaagtctcttattgttcattttcatctaatcagcgattttgaattattttatctatgagtaggatgattaactcacatatttcgatgaagttatataatgcaatgcatttatatatgatattgatttaaatagctataattgataattgcaaaataaacattggtgataacttcaggtcttgctttatatcaaaatatatagtttattaggtacatagtatttgtctgaatcaaaatataattaatcgtacataattgaaaactttaaactcttttttctaaaggatataacttaaccaaaaattcagattttgaatgatgttattggacaatacaaaaattaaggtttctgtaactcatgagtagcaaaattagtgactctgggcatgtctaattctagcaaatatcttctctctacacaataaagaacgattaaagcaacaagagaaaagaaatgtaccaaaatggttctaaaattactgattataattaaatcaactctgtcatcattttctgtgacaaaaagcttgaagttacgcacattgcctcacttagcatagtgtttccattcgtattcagatttatgtatgcttaagcatgatatctgtgttaggtaataacatatggttatttagccatgccatgcaaattacaaatgaatgcatattttaaataaagattggtgttagctgcaatgccttagcaaattaatgttttctctttagtaattaaatacacaaagcatgtttcttttagcctccaggttttcttattattggccattttatgacattttcaaagtagtctaccaaatagaaaagatccgtgctgccctttataaaacaatacagagaaatgtttatactttcaagcctgaaaaagtgacttgaaattaataactttttttctaaaagaagtcaatagattataagtcatggaagttaatataatttatttttggaatttgttgtcagtgagactactaatgcactactctgccatctccctaaccctccccaatcaataatactttttaaaagatatgtggtttaatatccatatgcttaaaatatatgctttaaatacaaatttcttaaggaattggagctttgtgtgacactgatgcaagatgttatctttgcttcaaagagtcagactttatggcagttccctgtagtgtgcacaatttgtgagtgtgtgtgtgtgtgcgtgcgtgtgtgcgtgtgtgtgtgttaagaacacttaatatgagatctaccctcttagcaaattttctagggacataatacaatattgttaactatagcatagtgtgatacagcagttctctagaatatactaatctcgcataactaaaactttgtacctgttgattaataacttcccattttcccttcttccagctcctggcaaacactattctgtttctgtttctaggagtttcactgttgtaaatatccaatataagagaaatcctgaagtattttccttctatgactggcttaattcacttagtacaatgtcgtccaggttcatctacatcatcacatatggcaggatttccttcttttgtgacaaacaatattatattgtatacacatacgacattttctttatccaatcatccactgatagacatttaggttgcttccacatcttgtttactacgaatgatgctgcagtgaacctaagtgtgcagagagttcttccagaacccaatttcatttttttcgatatatacttggtagtggaattgctggatcatatggtaattctatttttaattttttgagaaacctctgtagcatttttcatagtgattgcaccattttaccttcccactgacaatgtatataagtattacaatttctcaatatcctcagcaataaattgtttttttaaattgttgtttgtttttaatattggtcattctaacaggtgtgaggtgacatctcattatggttttgatttgcaattctctgatgattagtgatgttgagcacgttttcatacacctgtttgccattggtatgcctttttttgaaaaacatctattgaaatcctttgctcattttttgagggttttctttgccattgatttgaagttctttatatattttggatattagcgccttatcatatgtgtgaattgtaagcattttcattcatccagcaggttgccttttcactctgttgattgtttcttttgctgtgaagaagcattttagtttcatgtagtctcactttttgcatttgttgcttgtgcttttattgtcatgtataagaaaccattgccaagaccagtgtcatgaagctttctccctcttctaggagttttacagctcaggttttatgtttaagtctttaaatcattgtgagctgatttttgtatacaatatacaccgagtatatttttattctttttcatgtcaatatccagttttctgaacaccatttgttgaagaacctattctttcttcactgtgtctttttggcatccttgtagatcagttcaccatatataagcatgggtttattactgggctctttattttttttctattggtcaatgtgtacacagctatgtgagtaccatattgttttgattaatgtaggtttgtaatatatttgaaatcaagaagtgtgatgccttcaaatgtgttctttctcaagactgacttgactattctggctctattgtggtttatacaaattttagaatttttttttctacttatgtaaaacatttcattggaattttgattgcattgaatctatagatgactttgggtaatttaacaatattagctctctcttctgacccatgaacatggaattttttcaatttatttgtgtcttcactaatttcctttggcagtgttttatagttgtcagtgtacaagtcttttacttccctggttaagttttttcctaagtgtattattctttttgatgctatacaaaatgggattgttttctcaattttctgttcaaagagtttgctgttactgtatagaaatgcaactgatttttgtatattgattttgtatcttacaacttcattgaatttgtttattaattccagcagttttctgtgggtgcagtctttagggttttctacatataagttcatgttgcctgcaaacagagataattttacttcttcctttctgatttggctgccgttaatttatttttcttgtctaattgttctggttagaactttcactattactttgaatagaaaaagatagagtaggcacccttgccttgttagtgactttggaagaaaagttttcagtttttcaccgtgaggtgggattgatgatagctgtaggctttccataaatgaactttattatattgagctaaattctttttgtaactagcttgttgagggtttttgtcattaaaaggagttaatatttttcaaaagcttttttctttatttcttgagatgaccatttaatttttaccatttattctgtaaattagatatattacattatttgatttgcatatgtgggacgacctttgcatccaagaaataaatcccatgtggtcatggcatgcaatcgttttaatatgctgctgaatttgtttgccaatattttgttaagaattttgaaatctatgttcattgaggttattggcctgtagttgttttttttcttctgattgtatatttatttgtcttttgtatttggttaatatttgcctcataaaaggcacttgtaattgctcccccttcttctatatatattttgtgtaacagtttgaaaaagattgttattaattctttaaatgtttgttataattcatataattcatcagtgaaggcatatggccctgggactttctattatgagaggttttttatttctaatatgtaatttcgctaataattataggtctgctgatggttttcatctcttcatgatatagtcttagtagtttgtatctctctaaggatttgtctgttagttttcacttatccaatttgtaggcatatagctgttcatagaagtctctcgtgatcctttttatttcggtgggatcagttgtaatgtctctttttttcattagtaattgtatttatttgttctttttttccttgttagcctaagctttgtcaattttgaagatcttttcaaaaaatcaaatttttattctgtagagcttttcctaaggttttctattgtctattttgtttatttttacactaatactttttttttattatactaaatttgcatttggtttgttattttttctagtttcttaaggtgtaaacttttttatttgagatttttctccttatttaatgttggtgtttagcataataagcttccttcttagtactaaggaattagaatacttagcactctgagtattaagggatttattgttgtatcttataaacttttatatattgtatttttaattttcttctcaagaatctttttttttcttctcgctctgtcacccaggctggagtgctgtggtgcgatcttggctcactgcaacctctgcctcccagcttcaagctattctcctgcctcagcctcccaagtagctgtaactacaggcgtatgccagcacgcccagctaattttgtgtattttcagtagagacagggtttcactgtgttagccaggttggtctctatctcctgacctcgtgatccacctgcctcggcctcctatagatgactttagatctatagatgactatagtgctgggattacaggcctgaaccaccacgcccagcctcttctcaataattttttaggtccattttaatttcttacttggctcattgggtcaatattgtgttgtttaatttctacatatttgtgtaatttctagttttctttttgttattcatttctagttttattacattgtggtaaaaagatatttggtatgattttaatcttcttaatattgttatatttcatgccctaacatatgatctattctagagaatgttctgtgtacacttgagaagaatgtatattctgttgctgttgggtgaaatgttgtctgcgtgtctgttaggcctatttgggctctagtgttgtttaagtcccctgatttcttatcagttttctgcctggatgttgtatccattaatgaaagtagtaatatttaagtttcctactattattgcattgctgtatatttctttcttaggttcttctatataaagcaatctttatatatttaggtgctttgaactttgacacatacatacttcctgatgaatgaatatctttatcattatataatgaacttctttgcttcttgtgacactttttgacctaagcctattttttctgatgtaagtctggcaatgctaactctcttttggttgccgttggcatagaatatgaaatgttattttccattggtttactttcagcctatgtgtgtccttaaatctaaagcgagtctatatgaacagcatatactagtttatctagttactctatgttttttgattaaagagtgtaatccatttacacttaaccattttcccctttgccctgagaatacttgccggagacatttgtaactacagtatttaccttgaaataactttgccacaaaatatctcacttttattactattttttcatccttctagtatattaacttcggaaaaacattattctatttatagcattctgtttttagtagtgctatttccatttacaaaatatagtaattcttgattgttgaaaatgtcaaatattagaaaatgtagtgttaaaagcaaaatttcagccaaattaaattttaaaaagtttaattgagcaatgaactattcatgaatagggcagcctccctgaaccagaatagggtcagagactccagtgcagccatgtggtgggagaagatttatggaaagaaaaaaggaaattgacatagagaaaatggaagtgaggtacagaagcagctgggttggttacagctgaacctttgccttatttgaacatggttcaaacagttggccacatttgattggccaaaacttggtgattggcacaagagtagacgatagtctgtttatactttcatttagtctagagtttgcgatgtacagagaaacgtttaggccaaacttaaaatatgtaaggagggcagggcgcagtggctcacacctctaatcccagcactttgggagcgcaagtcgggcggatcacgaggtcaggagatggcggccatcgtggctaacacggtgaaaccccatctctactaaaaatataaaaaaaatagcgtgcgcctgtagtcccagctactcaggaagctgaggcaggagaatcgcttgaacctgggaggcagaagttgcagtgagcagagatggtgccactgcattccagcctgggcgacagaacgagactctgtctcaaaaaaaaaaaaaaaaaggaaggagacagctttaaactaaacttgatttaacagtagcattcctaaacgtgaggttaacatcattctcaaagagttgaccaaggattcatttgataaattcggtttttcggaaatagatgattctggtgattcagacaattctgatattagttctgtttagaaataactccaagaacagtttttatattttgttcttacatttaaaaccagtcaggttgtttcagcctcaaagaggatacttatgtaaaattaaatgagcgccgacagaagctgcatttttttttctaaacaggaaaagggttaaaaaattagggaaggatttattactgccattttgttaattattttctgtcttttttgtagttctttatccttcttttctcttatgctatctttctttgtgattagttgattttttatggtgatttgctttgattctttttttctcttgtgtatcttccatacacacacactgtctttgtgtgtacaagagttttaactcttattttctttaataattgagagatgtaatatactactatgtatgtgagagttttaaaaaatcatatatattcgtggggatttattagacttgcagtaaccacgaactgatgaactgatttgtttctttacacaacatagatttagtggttactaagtgatatagctgaagtttagacaaattaagtaacttacctaacgtgacttaagttacatgtggcattgaagagttctctgtagactcttgaccctgagagccagattgctggcatacaggatcttcaccacaattgccaacattgaaacctaacacaatagcctcccgtttgtctacagagggtatcttccaaggcccccgttggatatctgaaattgcagagaataccgaacccaaaatatactctactttttatacatacatacctaaaatacaatttaatttataaattagtcacagtaagagattaaaaacaataataataaagtgagttattataacagtatgtaagccttaccattcttggggccactattaagtaaaataatggttacttgaataaaagcactgcaatatctcaatcaccatccaataattgagatggctactaagtaactaatgggcaggtagcatatgaaacaaggatactttgaacaaagggctactttatgttccaggatggatggagtgggatgttgagagatgtcatcatgctactcagaagggcaggcaatttaaaacatatgaattattatttctagaattttttatttaatattttcatactgtaattgactgtgggtaaccaagaaaggtaaaactgtggataaggaggcactactctaataaggataaaactcacatttgtcctttgaaatgtaaatactcttcaagagacattcaacattgaaacttatatgactttagaactcaatgaagaaatttagagatttctagtataaaaagactaagctttaaagaaaaacaactcttttagatttagctgaaaacagcttataatgaatatacaattgaaataattattgttgtaaaagtaaatatgcttaaatatgtctttctgtttgggatatttttatcatgttaaagtaccacatcaacacactacttttttaaagaaagaaatagagaacttttagattgcaaaagtgtacgtagaaaataagtaagtagtgaaattttgaaatatttaccatcaacaaacactatcaaagctagaagtgtgcagttgttttcaattctgaataaatttcataaaataaataatactaaacattactcactttttcaacttaaaaaaaaaatcttttcagtgattttctggttttcaagcatcagtaaaagaaagagcatcaggctgaatcctgatgtgaacctgactcagtgggtagaacatctgtcttctctgagagcttgtcagtttgggtaaatgattgattatgctactcagagtcaaggatagacaacaccacagcactaactgacaacagccatgagtccatagcaagatttgctcatcatattcactcaaatttctggtctcgggctaaaatacgcatgacatttattaactgataagtttgaactattttatctaaaattaaatgatgtttttatttttgaataaatgaatattcatgctctttattgaaatgaacacattgagatgttcattactgtattagtctgttctcacactgctatgaagaaataccagagactggttaatttataaaagaaagagggttagttggctcacaattttgtttggctggggtggcctcaggaaacataatcatggtggaagacaaaggataagcaggcaccttcttcacagggcggcaggacggagtgagtgcaaccaggggaaattccagagaaccatcagaattcataagactcacgcattatcatgagaacaacatagaggaaactgcccctgtgattcgattacctccacttggtcccgccatgacacgtggagattatggggattacatttcaagaggagattttagtgggaacaaatgatatggattggggagcgaattcatatcagttactaatagatgcaaagtgatccaatattacaacctcaataaagtaggtttaaaattttttaatccttataataaaattattaaaaaagaattctggagaattcttgatggaaatcatcaatattcctagagaaaaattctacaaacttcagatgaatctgaatggtcatccttaaaggtcacccatctttctgtttgttttcatctaaaagacatcatactttcaatactgcaaaactacttgtttaagtagctttattttggataagtattcacttcatatattttatgaatttgtgacaaagctaatctaataaaatatgggtatttgtttttgtatctttgaaaatttcactcattgtcttcttggtctgaccactggggcaaataatattttcaatataaaacataaataaatataaatacatatttatattgtagatagtatacaacatgactattttattacatagaaaatatatatttatattgtattgccaatatatatttaacatatataaaatataaaatatacaataaacaacatacagtaagttcccacatattgttgtagagaggttcttggaaactgtgatgctaagcaaaatgacataaaaggaaacccattttaccataggttaattgatataaataagagttgagttcctataacatatttctggtcacaaaaacatcaccaaacttctaaatgaaaaccaaaacattttaatatttaatatttattgcaatattaaacattgagataaatgtaagctatacatacatttaagaaagattaataaaaacaagatcactacttagccaatgattccagttcagtgtcatgtgtggcaggaacctacctcagcagctcagtgccaaggctggaatcaaccttggacaggatggcattccctctcggcatgcactcaaacacacacccacactcactcagatgggaccaaagagacacaccagttcactcatgtgcacatctttggaacgtgggaggaaactggagtacccagagaatatccacatagacatggggagaacatgtgaactccacacaaagactagggaattgttttttttctcatcaacatgataacaaagtgacatcgaatgaaatgaagttattcaatgacatactgtgtataaataaagtgatctatgtggtgcttaatgagttaattttaaaattattttattgaagttacaataatttatgtaaaagggtggggaaaataacaatttaatccctcaaatttgacattactcttggatttgttttttatgtgtaacactttctcccatctactccattcagatcacttccaactcagatgattgaatttaaaaaaataagccttaactttccagaggcacttattgaatatctgctctttattcatgtatacttggctcacagaacattgcctattacatggcaggtgctcaatgtatatttgttgaatagattgaatgaaataagtttcttgtatgctgaagagtcttatcaaagatacttgaggtctttcatctaaggtggagtagttgaattctcaggtagatattgcatagtaattggaaacgtgacacataaaatggagtaactgaactgaaactaaaatatgtcttatcagggcaattccgtgagactttgaaagcatttttaaggctgcagttttggtgaaaatatacataaagataaatcaaaaggaaagctaccttggacagtatttttaaggcattaaaagtcagtttgtggatgggcccagtggctcacgcctgtaatactagcattttgggaggccgaggcgaggggatggcttgagctcaggagttcgagaccagcctggacagcatggtgaaaccatgtctctacaaaacatacaaaaattagcctggcatggtggtgcatgcctgcagtcccagctacttggagggctgaggtgggaggatcccttgagcccaggcggctgaggctgcggtgaggcatgattgcaccactgcactccagcctaggctgcaaagcgtgaccctgtctcagaaaaaacaaaaacaaacaaaagaaaacaaaacaacaacaacaacaaaaatttatttgcaatgtactgcagttaaaatatacatatagctagaattgaaggttctcacttttagcttctatgtttgatctatttatttcatagtgctgctggcacagcattttactgtgtcacataaattaactttaagcaatctgtaaaacttttattaatgattccaacaagactatacaaatccttttgctaatgaggtcaaggtatgcttcaaactccaggcaaaacagctgtcttctaacagagacagtctcatgcctttgcagtgtatatcagtttatcaactggctgtttgacaaatacatcgctttggttacaaacatgagagcaagatagagaattgggaagataataggttaaaaactggataaaaatttcagtttctttccctgaagtatcagcttcgtagaaacaagaaaatatctactatgctttcatattctattagattttctagtcactctattcagttgtgtccagattaatttatgtcttgaaatactctattaattgacaaatatttatgattcagatttagcaagacattatcctgtcagcaggtagaaggatgtgtaggaaaatatagaggctatcttaaaaagtcaggtttgattataaacagatttgtcctttaactttctccattcactttttcactcggttaggtttcatattttgcttaggcataatgaagtattatctatcatctaggcctacatgaaaacattctttaaatttaatttaactatttttcctatctggctttagagtttctttttcaaattcctctgcctacttcatgagaaatttgtatccaaaagtgaaattatttttaatatattttaaataatttatgctttaatcttgtgtaaataaaaatattgaccccaagcttaactgcatacttattgggatcatggttaccaattatagactgaagtgtttatttaaccttctagaaggaactgtaaatctgccattaatagagaatgcttcatgagctagcaaattagaaagcacctatatttaaaagattgtaggaagtggaaattgcctttaatatttaatttttgaattacttaggaaggctgatcattaacacaaactaaattatttgaagtgactatttaattgggaatatgtcaatagagatttaatatatctagcaaacattacataatttcaaacaaaatgctccattacttaatttgacatgtatacagtaggtaccagacatagtgccaagtactaaacacaacagagaattaggtgaattggattcttacatgcaaaaatactccaaggactttcattctatttactggttgatttgtctttgcaaaataacaaaacgatttaaaacctaaacagaaacaaaatatcttaatattaaagctttcttcagaaacattattaaatttcaactgagaactattaaatgttaatggtgttttgttatttttattgtctagaaaaaggaagtaaaatgttacaaataattctggtaataaacagtcatcagtggctactgcaatattgataattttttgctatataatttttcttttttaaaaaatagacctgaaaactgaccaagtaagaattttttttaattcttctgtaggagtctatatcatttactacataaggaaattcttaagatgtcaagttgtcttttccaatcaatgtacctgtaagtctataatcacctagtaattgttttcacatatgtttgatatacaatgaattacccacataatttcccagacattatcactcagccctaacttttctcttgggttcagggatattaaaacagtggagtggagagtgggataaaattcaatgaaagaacccaatagtggtgactaagtaaaatcaggtggagagaaaattgatggggatgaaagacagtgtgacaaacgctcttctcctatttcagtgctatctcaacatttctctggtttctttgctaacactatgttcttttcaagattctaaatttttatgtgtagatgttttttaaaactatgttttatgttaactttcaagttagctttggagatacatgtgaagatttgttatacaggtaaactcctatcacgacggtttgttgcactgattatttcatcaccaggtgttaagcctggtacccaatagttactttttctgctcctctccctcctaccaacctccagtcccaactagacactagtgtctgttgttcccctttttgtgttcctgagttctcatcattcagctcccacttataagtgagaacatgtgatatttggttttctgtttctgcgttagttcatccatccatgttcccacaaaagacatgatctcattcttttttatagatgcatagtattccatggtgtatatgtactatgttttgtttatccgatctgtcattgatgggcgtttaggttgattctatgtgtttgctatagtcaatagtgctgcaatgaacatatgcatgcatgtgcccttagagtaaaacaatttatattcctttgggtatgtaaccagtagtgggatttctgggtcaaatggcagttccgcttttagctctttgaggaatcaccatactgctttctgcaatggttgaactaatttacactcccccgacagtgtgtaattcccttttctccacaacgtcaccagcatcggttattttttgacattttaataattgccattctgagtggtgcgagatggtatcttgttgtggttttaatttacatttctctaatgctcatgatattgagcttttttatatgcttgctagctgcatgtatgtcttcttttgaaagcatctgtgcatgtcctttgcccattttttaatgaagttgtttgttcctctcttgtaaatttctttaacttccttatagatgctgaatattagacctttgtcagatgcatagtttgcaaaaattttcccacgttcagtaggttgtctgtttactttgtgattagtttcttctgtggtgcagaagctctttagtttaattaggtcacatttgtcaatttttgcttttgttgggattacttctggtgtctttgtcatgaactgttggcccgttcttatgtccaggatggtattgcctaggttgtcttccaggatttttatagttttgacttttacatttaagtctttgatccatcttgagttgatttttgcatgtgatgtaaagaaggggttcagtttcaatcttctgcatatggctagccagcaccatttattgaacagggagtctatttttatttttatttttgcttgttttcatcagctttgtcagagatcagatggtcttacatgtgcagccttatttgtgggctctctttgctgttccatacgtctatgtgccttttattgtactagtatcatactgttttggttgtggtagccctgtagtattgtttttaagtctggtaatgtggtcccttcaactctgttctttttgcctaggattgcattggctatttgggctctgttttggttccatatgaaccttaaaataatttttctagttctatgaagaatgtaatttgtagtataataggaatagcattgaattagtaaattgctttgggcagtaaggccattttaatattaattcttcctgcccacgagcatgagatgtttttccattttaacctatgcaaaacatagcagctttagactatgtaaaacatagcagctttagattcacagcaaaatagaaaggaaggcacagagatttcccgtataccctccacccgacacatgactagccccccttatcaacatcccttactagagagtacgcgtgttgcaatagatgaacctagattgacaagtcgcattcacccaaagtccatgttttaccttaaaattcagttttggtgatatatttgtgtatgcatatatatatgtgtgcgtgtatatatatatatatgtatatatatgtttttgtgtgtatatatatggattttaagacccctactaacctttaaaccacaataaaatattttatcaaaatgttaaaagtatttgctttttagaaatagagttgaatttcattatttatagtattaatgtagtattagagatgggagcattaataaataataacagtagtagtaatattatgtatgatgtattaagtgttcattctggccaaaaaatgtgctaaattctgcatttattattactttacatctaatcacaatgctaggtgacaattattaagatgaaaaccaatatatatttaaagacatggatgtacaatgaccactaaggagacaggtttaaccagagagagattctgcattgagtagaaatatgaggctttggatgggcatgaatttcagaatatgcttgagattcaaaaggccagttgactgactaaagtcttatagataacttttaatgggagacttactattggaattttgacctgttattaactattgacatttccaaaatttctgatagtgaaatggctatttttggtttgaagcctgtcattacaacttattgttcactaatctgactctggaacttattttaagcccccttgtctcagttttatcatctgtaacattttcctaataataatatattgctcatgggataattttaagaataaaatcagtgaagattttttgtatatgaatttatttgcaattgtgtctcatagaatccctcagaatattaaccacttactgttccaagactaaaggatccaaagtaaaaattgctttaattaagtccatggctaatcaatatgcaggattattcagcagttatttgcccataatggtcaaataactgcacttgtttatatagatttcttagagcttattgtacacattcttgaaagtagtaggaatagaaatacaatcaattcatttgaattttcagttttggtggtaaattgaagtgacatgcaagtaaaaataacaaacaatgtaagtagaattttttatccactcttctaactagatgtagattcattatttcggcggcaaatatattacccaggaaaggtgatgctacaaaaaagcagttgttactcttgtcaaattatcagttattgatgtgcgaactaaaatacccaaaagaaagaggatgagaagcatatggtttaacctcaggcaacagacctgtatgacttgctgtgaatttttaccactttattccagataattcccccaaatgatacatatgatatttcacatgagtaagggaaacggcagtgttaggagagggtgatagctgctttgtcttccttatacagctttttccatttagcatttattctatattaagacaggtgaaacttttatggaaagaaattacaggctcttttcagaatcccccaaaataaaatggcacatttttccctcagagtaaagagttctccagcaattgtctcattaatttaaccaaaaatcggtctaccattctaggtagtcagggtactaaattaaaaatataaggtattcaataacatttaaatggtagttatacatcttctaatcatatatggcttttctatgacaagaaaattatataattttaattttcagtgtttcagtagatcgacggtacttttgaagtttcagttgaggataaaatcacacaacatctacatgaggatttgggattggagcataattttttgctgagtatgtgcagagttcccaggaagggaaatgcctaagatataagtaaaattcaaatttaatatgcctttcataaaaggtgattgggacaagctgttaaataatagatttgcaactctttcacttcaactcaacaaatattaagtttgagtttcaaacttggctaattaggtgagtcttttgggaagggaaaatgggattactcatcggggacctctgcttgggaagggaggccaaccggttctgaactttactctgttttatgaacattattgaaatgtaagttcacagtttcaaccttaattatatccagagggtccagaaccacatttttttcaagttcatttatcttgagcaaccagcactgtttgattttttgcagttgccaactctctcctgcggatggctcagatgcaatgtatgtgataaatcaatacagaataggttaccttttctcaaagaatttgccattgaattgtgaaactaaaactatgagaaagtaaataaaaatgtaaatgcaaagtacaatatgaatctgtattaagtggtattgtatagcacagagggagaataggtcaaggctaatgaggaatgatttcttcgaaggaggaggtgggtgaaaactgggcgagcattccagatagatatatcatggacagctggcaatatgtcaatcaccagagccttttggtactcattttttcaaataatcctgcatcccagttttactattcaaataattgatgtcaaagtgttatgtcatttcattaaaactcattttattaattatttaattgattaatctctcctttgcattgtattaaaaatagcacacatttaataaaatacatttaaactaatgcatattttataaaatttttattttttatagattttattatgaaaacattgaatataaattttggtttatatgttacaatattgaatatctaagcatgatgtaatttactacatgttttagttatttcatttgtatcatacatgccttttggtcatgttgtacataatacaaaaatgtttaccctatatatttttaggctaaagtaacaaacaatatcatttgcaatgtgtgttactagaaacaacattaattttgcttctagatgtagaatatttaaattaatattaatgttataaaatcttatgtctgaaatgtggattgagataggatctggattttaaatatgaaaaaaatgggaggagataattttaatgacagtcagatttgtgatagaaagaacatcattaatagttaatagtacagcattatttttcccctaagttgagatattgctttaaaaaatataattctaacacattgggtttgtttttaatttgcagggagtacatgtgcaggtttgttgcctgggtaaattgcatgtcatgggggtttggtgtacagattatttcatcacccaggtaatgagtaaagtacccaataggtaatttttcattcattaccctcctctcactctctgttctcaagtaggccaaggtgtctattgttctattatttgtgttcatatctactcaatgtttagctctcacttataagtgagaacatgtgacattttatttcctgttcctgtgtttatttgcttaagataatggcccccagctccatgcatgtcactgcaaaggacatgatttccttttttttttggtatggatggatagtatttcatggtgtatatgtaccatattttctttatccattccaccattgatgagtatctaggttgattttgtgtctttgctattatgaaaagtattgtgataaacataagtatgcatgtgtttttataatagaacaagttatactcttttgtatatatactcagtaatgagattgctggattgaatggtagttctgttttaagttctttgagaaatctccaaactgctttccacagcagctgaagtaattgacattccaaccaacagtgtatatgtgtttcctttcctctacagcatcaccagcacctgctttttgtttgttttttttttgttgttttttgtttttttactttttaataatagccattcttactgctgtgagatggtatctcattgtggtttgaatttgcacttctctaattggtgatgttgagcatttttcatatgcctgttggctgcttgtatatcttcttttgaacagtgtctgttcatgtcctttgtcaatttttaatgggtgtcacgaagtagagtgtagtgaatcaaaaatcctaagtctgatttctactttcccttgactttaactttggtccattaaagttcagttttctcatttaaaaaattgatttcaaaaactcaatattcctttgagaatctaataataagagctgaaaaaagttacttaaaacattaaatggctataaatattattgtcagtataacaaatatgaacttatgataaacttcacagtatattactaaattgtgaaactttccaagaatcttgacagtttgttttgtgagaaaatttgggagtttagctaattcaaggatctactaagagcactcaaattagagttaaatttttttttctttatacatttgctccttttggaacacttgtctttttatataaccatgttgtaagacctgtctctctcatccagctgaaaaattttgagtttatggccttaattgcttactggttttaggacataatggaacattatggcaaaagacttcactcttcaaggttaacaagagtcagtttaaataaactgtccatatatactttgaggaataatttttgactgtgaagacatcaataaaattttgcttcaattataattaaaatttttaaaaattgcactactgttcagaatgttttccttaatttttaattatttttgtcaaaaatgtagaaagcaaaaattctgtgacactaactgtattaggtgctgaggttataaaattgattgtctaggctctaaacctttcatcaaagagagaaaaatatgacataaataacatattaagtatacacgtgaatgtgtgtgtataaaagtccaaactgagactagagatacattgtaagaaggataattgatactaaaatctgaagattgagttgcaagccttttggatgttagaaacacattccagatagaggggaaaatagtatgtataaaggaattgaacagagtaaagtcatttggttctccaggaactgaaaagaaagacaagcatggttcaagtgcatagagaaaatgggggagtggcaaaaaagataagttggagagatagttgttgcacaagtcctccagttgcacaggtttgtgaatggtttgatattttatcatattttaatcaatgtgaaatgggaaattatagttaacgacaaattttattttacatatatactcctttttaatgattcccatttcccatgtgtagggaatacatgagtgttcttaaacgacaaactctttaacttcgtggaatttacatttttgtgggttgggagagcaaaaaataatagtaaagaataaatatggcattcttaatattttcactgctgatgagaattatgaagaatgatacagcaggaaaaagtagtgaaaggaattaaaacgtgctatttcctcctttataggcttgtcagggaagctctgaaggtgaggaacagaacgtgatgaggtcagagagatgtgtgagtggtaggtcctggatgagcatataagccatcttataaactttggcttttaatcgcttgaggttaggtgagagcagttggtagggaataccatgtgtctattttaaatatgtttgaagctattatagtattagaaaagaatagaaggaaaaataaaagatgtctcctaaaactgtgtatttgatatgtttactgagaaaaggaagtctaagcaaataagaggtatgagaagaaataaactattattttttatttatttattttgagacggaacctcgctcggtcatccaggctggagtgcagtggtacgatcttggctcactgcaacctccacctctgaggttcaagcgattctcctgcctcagtctcccaattagctgggactacaggtgcccgtcaccacacctggttaattttttgtatttttagtagagacgagattccatcatgttggccaggctgttctcgaactcatggcctcatgtgatccacccgcgttggcctcccagagtgctggaattacaggcatgagccaccatgcccagtggaaatacatcatttttatggcaattttaaattagatatgtaagcagaggtttccaattggcatttgcatatgtccatctgtagttccaggaaaggtttttttggtaggcactatagttttgggcaaccctggaatatacatattttttaaaagaggacttcttaagttcccatgaatctgcagtatttaaatttagaaggctaaaatataatctatttggatttttaaacatttttgttaaatcataatatacacacaggaaaatgcacaaatcttgatgaattttgacaagttcaatgtaaccatgaaactatcacccaaatctagagacagaacagtataaggtcccaaaggatcctttgtgctcttttctattgactatagcttccaaagtgcaaccactattctaatatcaatgagcataaattgtttgtactccatataaactaaatcacaataatgtacttttatcctggatttctttggtcaacactttgtttgtgagatttctccatattgctataaaaatgtatatagttcgaattttgaaattaaattattttttacaaggctagaattttactttatttttagagaagataatgtggaaggtttaactcaatcaaacgttttataaatgttttataactggtaagtggaagtacttacctgattttttttgagcaaagtaaatcttccaagtttatatacctgcacaaatgtccactttacttattgtttgatatatagatattctgcaacacaaaataaactaaacctaaaaacatatacacacatgcatggaggtaaacatggatcatgtgtgtgcatgtatgcatgtatgcatgtatgtaaaatgtaattgcgtagccaattggaaaattaatttaaatttatagagataatacaggaaataaaatgactactttttttgtactgccaattgctttatccataatgattgccaacagtaaaatttaaacattttctaaaactcattctcccagctttttggaagattcttttagttcattcataattttttgattgtggtagctgtgtatcaaactttgaatttaaaagctagaaatgtttattttccctgaaatagaacacatttgtcaccactaagaatttcatttgctttactttattctcatagaaaatgtatggaataaataagacatcccagcatgcagagatctgaaataaaattccagtgcaccaataaaataaatgtgtttattgtacatgattctaataataaatattgtgttagtgtttactgagcacagactaggtcagtgtatatctctctttcatcaaatgaacacaaagatcttgtgaagatagtgttattgttttcattttatatattgatttataatttaaaaagcttaaataatttgtccaaactcatcgaaaatcttgagtaaaaaagatttctgtcaggctttctagaactctgaacatataaatacagtaaagaggaagcagaaaatacaattgcaaatagaactacacaccagccagtattagctaaacattaaacattagtttagttttaattttgaagcaaatttattaatatacataaataattctccagatatttatgtcttttctctataagctaaattttgggatctattctgtatgtttgtatgtctgcatttgtatgcttattcttgtctcccctgccgccctttccatctctctttctacatggataggtagatagataagcagacagatagctagacccattataacattatattagcagttaaaggagaggagattttaaaaagcttatgaaagagtaattaataatgaacccctggctatgccaggaaatctagtgacaaattggctatgtagaaagaacaggtaacaagccattattgatgctgattagttgtcacaaagaaataaacatgaagcttagtcattgataagtccattaaaaggtaagtgtttgtaagaaatatgaaaacgctttacagactaaatatattggaagaaaaattggagaaaaatgagcgagtctttagagaaaagaataggggtggagctgcctgtacaactgaaattgcactgaccatgaaaaccattaatagaaaattggacaaggaaaatttaggagatggaagaaacgattatttttaataaatgatttcaaaattgttataccatttaaaaaatgtttgagatactaatttgaaatttctagtccaaagacccgaaagagttaatatatgtagggaagtcactaatgcattttcgggaaggtcctttaaaaaaaattaaaactttaataacacaactgcagttgaaatcacatttacatctgagataaagaaaatagtaatgttatggctgatttgaaataatgcagactaatcgtaaaataatagctataacaataatggaattaaacgagtaattcattttacagattaatctctgtgggttacattagctaaagacaaacatttatttgcaagttttttttctaatatcagtgtaatgaagaactaaattgtacaagactatacaaaaatatttaagacatctttttttgtatatagatcactgtgaaagctttcccatctttcattgctattttcttgattactattaatttttataattcacaacttttactttactattcttcaatatggtacttcattgcaattggctacctaagtaaactttatacatatgaaacaaaaccaaacaaaatgataaggttgtgggccatgaattttttattattttgtctggattaattcaaggtacgcctcagtagcactttcttattcaagacactgagggtagaaaataattgttatttccaatacctaattccaacataaactggcaggcaggaataaagttaagtcttctgattgagagggaacaagttagtaatagtgtttgctcaattccttataaatgaggattactgttttaacaaaaatcttggctgggcgcggtggctcacgcctgttatcccagcaatttgggaggccgaggcaggcagatcacgaggtcaggagatccagaccatcctggctaacatggtgaaaacccatctctactaaaaatacaaaaatacaaaaaattagctgggtgtggtggcaggcgcctgtagtcccagccactcgggaggctgaggcaggagaatggagtgaacccgggaggtggagcttgcagtgagctgagattgcaccactgcactccagcctgggcaccagagcgagattccgtctcaaaaaaaaaaaaaaaaaaaaaaaaaaaaaaaaaaaaaaaaaaaaaaactttgcctctagagaaaacattctacttcattttttttttgtcgacctaatgtagctaatcatctcaaatgtgagctgttaggtgagaagttttacatattaaaaatcaagtatttttcaatcagttgataatcactttcctgctctctgtaggtgactattgattcattggtttgaaataatatgagacagttgacagacagtaatagtaatgtaagcaattctcctcaagtaaaaagagctttgtaaatatgagattgtttctctccatttcagtataagatatttaattcctcatagtcttattaattgcactgttaatcttttgatataacttcttttaaaaaattaaaacaataaaaaatagaattctattactactactaataaatcagaaagctttaaattactataaatatatactgtagtatgcaaaagtatatacgtgctatacgtttctcatgcttttactgagaaatagtcctttataaaaataaatagaagggtatttcattcctttaataatttattgtcgtaacttcaatggttatatcttagctgcaacaagatggaatgacaaaggtctattaatgtaatacaataaggaaatcatgtgtggcctttgtcacagaataccaaacacatgtcattcaggccaaatttgaataacgtgttacctagcaaagtggtatgctttgctttgctttattctagtgctgtgctttattctttttcagaatttgtttcaaaaacccattgcctgaccttaatccaacctctatccttgagtcccaacagcctgctctctcaggaaactttgtgcacacactgaactgcttgctattcttattcacattctaagacactttccaaggagagggattattttcatcttcaagtcaagatgtgtctttgaaatccagaagacttgaggaagtattggagacaatgcagttttccaagaggaaagttaatggaatgaggagtggcttataaacatgagaaagtaaaatgactaagttctcaagaatgagagcaagttagcagggtcaactttattctaaatgaatattttatattatttcagtagtggaaatcttttagacagtgagtgtcagtatagagtgaagtaatgaacatctcatcaacagtgaaataatatgaggaattttagaaagcacaaaaagtataaaatttactataaatcatttaaaatacatataaaatacatataaaaatcataagtccaaaatttcaatttgaaaaatgatcaaatgttggttggaaaaaattttattaattgtttaataatcttaatttttttaatttttaattgttttattggagttataaaacaatcatatgtcattttgtaataatagtgtactatatggctgtcctagtccatttactgttgcttacaacagactccctataactaggtaatttataaaggacaggaacttatttcttacactggtgggggctgagaagtccaagatcccaggactgcttatggtgatggtcttatttttccaggacttgtaggtcaataagtctgaaacgactaacgttgaattttggttgaaatcactagagcataatgaagactttcaactgaagggttgcctgcatcaccctctttaactttagatgacagatttttgcactcttctcaggtactcagttatgttgtgtggctaatatttaataagaaagttaatggcatttggaatctcatatcagggctctaatgccaacagctgtagctattattcctttcacccatgtgtatatgatcggcactctactatgggaagctcctgaagaactgcctaagaacaaggtacttattctctgtatccctagcaaacatcccaagtatggaaatggaaagcactcaaccaatttataaataaaagaataaatgaatgaatgatatggatcttattacagatttcattagtttcatgaatatcatacctataatgatacctagcaatagacttcctagaatagtacattttaaattcagattataagtaatgaacattaacttttaagttgtgttgattaaacataagcaattataataatattttgtgaaaatttgcagaatacattttaaattcagattaaaattaataaatataactctattagttgtattgattaaacacaaactaatataatacgactttacaaaaggcgtcataaaagtacttatcacatttaacatgtaaatttcttctgctgtttatagccatgccaagtaatgtatgtttgacacttcatatgacacttcaaaattgcactttgtaatgcaatattttgacatataactgcaaataaagactaaatgactgcaagagaaaaaaagtgacagatactccagcctgctttattcagccatgttagcaacagctaaccctgaaacttttaaatgatgatagagtagaaataaaacagaattctggtccccatataagaaatgagagattaagaagggaaatatcacattgatttgaaaaataccattttaaaagtatttgatggtttgtttatttctgattatgaaaaaaaaaggcttggtttaagataatggaatataaagaacattgctgctttcctctctcaaaaaacaccttcagataccaagaagacacacaaaaaaatgcaaattaatagttcacaaaataaggaaatatttttaacctaaagctgcaacatatgatgaagagctgccaaataacataaggcttcaagaagtgttgcaaaagatggccaaggagacgtctgcagctgcaggcctcagggataactcagttttgcaatagctatgatttcttgctttaagtaatagtaaggagaactgctgtctgatgtatgaaactttctctgtctggtttgcaaccataaagaagtggtggaaatgtgtgttggaaagagagataacctaggtgtcatggttaatactgtcaatttgattggattgaaggatgcaaagtattattcctgagtgtatctgtaagggtgttgccaaaggagattaacatttgagtcagtgcattgggaaagcagacccacgctcagtctgggtgggcacaatctaatcagcagtcagcatagccagaataaaatgcaggcagaagaacgtggagcaattagactggctaagcctccctgcctacatctttctcccgtgctggaggctccctgccctcaaacatcagactccaagttcttcagctttgtgaatggactagcttccttgatcctcagtttgcagatggcctattgtaagaccttgtgatcatgtgagttaatactcttcaataaattcctctttatatatacatcaatcctattagttctgtccttctagagaactgtaatacgctaggtacaccatgtttgttacaaacattctgcctgtgagaagccgtttatctgctaatctctgttagatgaggaagggtgaagaaaacaataaattacagatcccaatgggaaatcgatagatttggctacataaaaattggtatttacgattttttaaaaaaatctcccaaatagttacaaataatactctagaaagtaattgtaatgaatgcaaaacacattcacacatccttaatataaaagctgtagaaaatattaaatattttacccttaaatagatgtaagtcaaaacgtgaatattttgcagaaaaattcatcaaattaataactgtctataatatcaacaataaacacaaaaatgaaatttgcctttttattaaacaattttagaaacattaataaagtaaacatattatttgctggtgagtggatcatataatagacacttctatagctctcagatatattattgtatatgcaatgagaaaacatcaatataacatttctggatgaaaatgtagcaatgcaaataattatctaacgtttaataaattgatatagcatagagcatcataacagacagtgtttagaagaaaaaccataaaattactaaaagaaaatgtaaaagcaccatctagcatggtagctcattcctgtaatcccagtgcttttggagatggaagccagagaatcacttgaggccaggtgtttgagaccagcctgggcaacatagtgagacttcatttctacacaaaattgtaaaattaaccaggtgtggtgacacacacttgtattcttagctattcaggaggctgaggcagaaggattgcttgagcctagaagttcaaggctgcaaggagctatgattgcaccactgcactccaacccaggtgacacagcaagaccttgtctctaaaaataaaaaaaaaaaattaaaaagttagaagcagagcacacattaggcagtctctgtgttagctgatgactgatgtaacatgggacattccttcgatgtatatatacttaaggcaaggtatatactgccctcgcccctcctctaccactcagaggtgaactctctcctaaaattccctccattcagtatattggtgatcagtcacaaagtaaagaaaaagagggaaatttgcatgttttattatctctggaggtagagtttgatggcaaatattgacaaattaggtgagaaaggcaaagatcagtaaagaaaccagtaaaaatttccaaaactggaatttcctcttgggtcactagtgtcaatcataaagaaaggaaaggacaaaataagtagttcaataatgcactgaggtagcatattttaaacatttgaatcatttttataaagtaaaacatgccatttaacctaactatgacactacttttacattttgaggtactttcatagaatgacatctgttgtttctgaacactggatgcactttatctgaagtaacttaacattaaatgcatcagtactgattgattgtttaaatcattgttattagtaatctaattatttgacctcaattacctttgttatttaggcatgagtgatatttgataagggatgcaaaaagttaacagtttttgaaccaaaaactatctttaggaaacttccagaaatgtagacaaatattgagatttaagaaaatgctgtttaaataataataaaaactaaatgatctcaccgacttgttagcatggccattataaaaaagttagaaaatcataagcatttgtgaggacgtagagaaattagaaccttcttccactcttgttgagaatgtcaaatgatgcagtgactatgaaacacaatatagaggttcctcaaaacattaaaaatagaactaccgtatcagccagcaatcccgcttatgggtatttatccaaaataattgaaatcagaatctcaaagagatatttgcactcacgtatttattgcagcttgattcacaatagccaaaaagtagaaacaatcaaagtatctaccaacagatgagtgaatcaaaaataatgtgagatatatatatatatacacacacacaatggtctattattcacccatgaaaacaagaaagtcctataatatgctgcaacacggatgaactttgaaaacatcacgcaatgtgagttaatcatttcacatatctgagatgactaaagtagtcaaactcatgaaagcaggggatagagtggtggttgccagggctgggggaagggagtaaaggggagtttctgttcaattcttataaagtttgataaagttacacaagatgaaaaaattctagagatctgctgtacgacactgtgcttatagttaacgacactatgctaaaaatgtgtacatgtgttaagagtgtagagctcatgattgccttttgtttttgtttttgagacagtatcagtctgtcacccagactagagtgttggtttgtgatctggtgtgatcgtagctcactgaagccttgatctcccaggctaaagtgaacctcccatctcaggctcccaagtagctgggactgtaagtgtgtgctaccatgcctggttatttaaaaaaaaaaaatttttgtagagacacattctcactatattgtgcaggctggtctcaaactcctggactccagcaatcctcttgcctcagcctcccaaagtgctgaaattacaattgtgagctattgtgtctagccaaagttttgctttttttttccccccaggataaagaaaggtgaatgagaatgggaaaataaattgcattttgttaacaggatggactattatatagacataaattccatgtattggaaaaaatttttgtcacagaaaaaatgacattatagtaaatgaaattaataataaaaatcatacctatagtattacaggtttctttgttggctttctgtcttgatgacctgcctagtactatcagtagagtattatagtcccccactccaactgtgttgctgtctctcatttcttaggcctggtactaattgttttataaatttgggagctccagagctaggtgcatatatatttaggactgtgataatttcctgttgtattagtccttttatcattatataatgtccctccttgtcttttttaactggtgttgtttcaaagttttgttttgttttttctgatactggtgtccatttgcatggaatatcttttaccactcatttaccttaagtttatttgcgtccttatgtgtcaggtgagtctcttgaagacagcagatagttggttggtgaatttttatccattctgccatttcgtatcttttaagtggagtatttaggccatttacagtcaacattagtatgcagatgtaaggtactattctattcatcatgctagttgtttcctaaatacctttttttttccactgtgttgttattttataggtcctgtgatatttatgctttacacttattctattttggtgtatttttagatttgtttcaaaatttagagctctttttagcagttcctgtagtactggctaagtggtaaattctcttagcatttgtttgcttgaaaaacactaccttttcttcattcatgaagccagtttccctgtatacaaaattcttggctgataactgttttgtttaaggaggctaaggacaggaccccaattccttctagcttctagcatttctgttgagaaacctgctgttaatctgataggttttcctttatgttacctgatacttttgcctcacagtgcttaagattcttttcttcatcttgacttcagatgacctgatgactgtgtgcctaggcaatgatcttttggggatgaatttcccaggtgttctttgagcttcttgtatttggatgtctagatctctagcaaggctatggatgttttccttgattattctctcaaatatgttttccaaacttttagatttcttttcttcctcaagaacaccaatttttattagttgtggtcatttaacataatttcaaaatgtcttagaggctttgctcatttttttaatattcttttttgtctattctggtttgtgttaatttgaaagccttctttttgagctctggagttcttacttctacttgttctattctattgctgagacttttcagtgcattttgcaattctctaagtgtgtccttcatttccagaagttgtgattgttttttatttctgctatctatttcactgaaggtttttccattcatatactgtgtctttttttttttaattctttaagttggtcttcacctttctctggtgccttattgattggcttaatcgcttacctttcaatattttttctggcaatttagataccttgtcttggtttggatctattgctgttgagctagtgtgatctttggggggcattaaagaaccttgtttcatcatattaccagaattgattttctggttccttctcactggggtagactatgtcagagggaaaatctgggactcaagttctgctgttcagactcttttgtgccatgggtgctttcttgatgtgatgctttctcctttcccctatggatggggcttcgtgagagccaaaccacagtgattgttatttctcttctggatctagccgccctgcagagctactgggctccaggcttgtactaagtgagtgtctgcaaagagtcttgtgatgtgatatgtcttcaggtctctcagctatgaataccagcacctgctttcatggaagtagcaggagagtgaagcagaccctgtgagggtccttggttttatttttgttaagtgtgctgcttttgtgttggttggcctccagccagaaggtggcgcttttgagagtgcatcagctgctgtggtatgaggaggatcacgtggtggatagggacctagagctcccaagagattatgacatttgtcatcagctaccagggcagatagagaaaaaccatcaggtagaggcacggttaggtgtgtctgaagtcagattttccttgggtgatgctcactgtggctgctgtggggtataggggtgtggttcccaggccaatgaagtcatattctcaggagcattatggctgcctctgttgcatcacacaggacgctagggaagtggggaaaagctgacagccacatgtctcacccggctgccgtgctgcccacagccagaaaggctggtcttactcctattgtgcccccacaacagaaccaagtttatttccaagcagctggtaagcagggctgagaacgtgctccaggctacaagcctcccagctgagaatgcaagccaactcacagtttctcaggcatcccatggagcctgcagaggcaatccgcatccttcaaagggtttgtggattctttctgctttcctggtatgttcctgtgtagttcttgaagtgaaagttcacagtgtgggtctgcacaccttactctgtctgagtgtgagctgccagttagtcctgcctcctatcccccatttttcctcgtccttttaattcaatactttttaaataatgtgcttaaactcatctaggtttctactggagggtattcctgagcaatgaaaagtaaaatgttttagtgtagattgtgcatttaagatgatttataactccagatgcaataaaaatattttgcatatgaatagtagattttagaaataaggttgtctttaagatacacttcagttgttggcttttttcattaacagtatttaagccagcaataaatacattccttaagtcattaatgccctggagtttgacaaagaaataacctaaatttgggagagtatgacatcttattgagattgataaatgttaaccaacaatgtgcttccttttgacagctgtgaccttctttttcgccgacttcgaatcataactaatgggaaggccttagtaagctgaaataatgaaagctgatttatttggccttggtctaggttagatactaaatatccaggcaagagatcccaggggcaaggcataaactaaaaattaaaatgtgaaatcaaatggcagaaaagaatccagacagtgttcataaagagactgtttttatataatcataggactagaaaaatgtaatttggaatattagttttatgcttatattttctcaatcatgtaatttttttattgctcttagttttctgtaaagtctgtttgcatcaatataattcaattatttaaaacatttaatgcataattattattataaaaataatttaaagatagaggtaaatggaaaaccgaggaatgtgtgtggcaactacctttagaatgtaagtatacaaccttcagggggagctaaaccaccaatgaaacaaaattctgcctgatcatatatcacagacataaaaaagatacatcataaaaatccatgtgccaataatggctttgtattaccatttaaaccttataattacctaaatggaaacatgttttatttctgaagctgaaaagacaattttccatttaataaccatttattctcagtccatggtacacaataatgcttgcatgatttggaaaccgaattaatcagtttttcagttccagtataattaaaggtgttcatatctgctttcagtacacaaagggtcattaaactagagaaaaagggataaatattaacctcacagattacttttataggttcggtgccactgtgaaccacctctatattataagtgttcattataccatttcttttcaatgaatccattcaatacattaagatgtaaataatgaactgatacctaaattaacaacaaaacattaactcccattttcctcactctcgccttgcattagtccctcagctgctgatggatctatggatagtctcagacacacatctgcttctctgacacaaaggattatgatgaggaaataaaaacaccttaatatagccaaaatcatacaataatattattaagaaataaaattaaaccaaatttaataaaccaataaacttcaaaataaaacctcattgacccttaagtattaaaaggtgatttattcaattacccatagtatgttattaacatagctatgacttctttgtatttgttagaaattttatattaagaaatatatacagtagttcccagtagaaatttatataaaatactctattttacatatgtaatgaaatctaagatttaaaagagattctttactctggggaaaataatggtggattaattaatttggtactcttttagggcctttctaaattaaaactccacattacaatttccaatgcagcccacaaacttaaatttatgaagaaatttaacaaatctactaagaaataaattcaaaatctgtaaaatatgcaattttaatgttatttaaaacttttattgcaaatattcctgttattagcaaagtagaatcaatgtaattcagcctattaagagagtaaattaaaaatccacttcatacccattaggatggctatcatatatttaaaaaacaaaacaaacgggtatttgtgaagagagagaaactagaactttctgccttactggtgggaaagtaaaatagtgctgctgtggaaaatagtataacaatttaaaactaaacataaaattaccctatgactctgcaattctacatttgagtacatacacaaaataattgaaacagcaattcagacagcttattttgcatccatgtttatagaatccaaatgtcctttgatgaatgaatggataaacaaaatttggcatttatacacaatgcaatgttactcagctttaaaaagaaatgaaattcaaacacatgctataacataatgaaccttgaatatatcatgctaagtaaaaaataataataaccagacacgacaggacaaatattgtatgattccacttaatgaggtgcctgcagtagtcaaattcataaagatgaaaagtagaacagtggttaccagggcctgggagaatcaataatggggagttattgattaggggatacagtttcagttgaggaaaaagttctgaagatttataagggtggttgaacaacaatgtgaatacgtttaatggcactgacttgtacatttaaaaatagttacaaggataaattttatgttttcaaaatttaaaaaaaagatcttaattgatgcagaaaaattatctggcaaatccaatatctatttctcaagtgtaattgtatgcctttcaaaaataattctgtgactttgttgaaggctacgagcctactgtgtgtgcctaatttacttttcatctacttgggaataccacttaacttcaagtttcaccttggctgggcgcggtggctcatgcctgtaatcccagcactttgggaggctgaggcgggtagatcacgaggtcaggaggtcgagaccatcctggccaacatggtgaaactctgtctctactaaaatacaaaaaattagccgggcatggtggtgcgcgcctctagtcccagctactcgggagactgaggcaggggaatctcttgaacccaggaggcagagattgcagtgagccgagattgcgccactgtactccagcctcgcgacagagcaagactgttgggtcacgcctgtaatcccagcactttgggaggccgaggtgggtggatcacctgaggtcaggagttcgagaccagcctcaacatggagaaactccgtctctactaaaaatacaaaaaaattagccgggcatggtagtgcatgcctgtaatcccagatacttgggaggctgaggcaggagaattgcttcaacctgggaggcggaagttgcgttgagctgagatcgtgccattgcactccagcctccagcctgggcaacaagagcgaaactccgtctcaaaaaaaaaaaaaaaaaagattcacctcaattacaattaccttctggacccttctcccttaacctttttctgtgacaagatgaagattcaattgctttacttttattgttgatttactgactgctttatcaaaaatttatcaagaatattgtatttgatcaaacgctttctgcatgtgttatttttaaacgtgctaataaattgaactacctcgatcaatttatatacctcattatattttcttgattatgtttagtagttttattattattattattattattgtactttaaattctgggatatatgtgctgagcgtgcaggtttgttacatagttatacatatgcccgggtggattgctgcaactatcaaccaggtttgcaattaggttttaatccccgcatgcattaggtatttgtcctaatgctctccatcccttttcccccacaccctgcaacaggcctcagtgtgtgatgttcccctccctatgtctatgtgttctcattgttcaactcccacttatgagtgagaacatgcggtatttggttttctgatcctgtgttagtttgctgagaatgatggtttccagcttcatccatgtccctgcaaaggacatgaactcattcttttttatggctgcatagtattccatggtgtatatatgccacattttctttatccattctattattgctgggcatttgggttggttccaagtctttgctgttgtaaatattgctgcaataaacatacatgtgcatgtgtctttatagtagaatgatttacaatcctttgggtatatacccagtaatgggattgctgggtcaaatggtatctctggttctagatccttgaggaatcaccacactgtcttccacaatggttgaactaatttacactcccaccaacagtgtaaaagagttcctatttctccacatcctcacgggcatctgttgtttcctgcttttttaatgatcgccattctaattggtgtgaggcagtatctcattgtggttttgatttggatttctctaatgaccagtgaagatgagctatttttcatatgtttattggccgcataaatgtcttctttagagaagtgtctgttcataaccttcacccactttttgatagggttgtttttacactttttcttgtaaatttgtctaagttcctcgttagtcttgtggatgcttattaattttatagatcttttcaaagaaagattttagtttcattagttctttcaattgttttattttatttttttcaattttaaccctctctaccctgagtttcatcatcttcttatgtctgtttacttggattttctctacttttctatttctactttctaaggtggcaacagaggtcactgagatgaggcttttatttttgaatatggatattttgtattatagcattcttgtaatttcaggattaatccattttacaaattttgatgttttacttttattataaatcaaacttttttattttgttttttaatttttttatttggcacttctaaatgttggtgaattttctggatatctttgtgtcatagatttataattaatttcataagagacagtcttttttatgacttgaattttagcacagaatagagtcttatgtttgtaaatgttccatgtatgcttaaaaaaagtgtactttgctggtttttggagtgtttataaatgtcaattaggtcaagtttgttggtactctaattcaggcttatgcattttctatatgttctgttaattactgagagaaaattcttgaagtcttgatgatgtaaatttcactattccttcttgcaattttatcattttttaattcctgtactttgaagctctggtaatatttcaatatttgaatattgaacatctttttcagaatataatgtctccccctagccctagtgatattctttgttctgaaattgattttgtatggtagtaccataggtactctaatttaatttttgttagtattgccatggtatatgtgcttcactaacattttacttataaaaaatttgtttctttatattgaaaatgggattcttgcagttagcaaacagtttaatctgggtgtttattcgaaaatgacaatctggtttgtattggaatgtgtccactccatatatttcatgtgattgttgatatgcttttgtttaactgaccatttgatatattttccatttgaaccatctattatttgttcctctctcccttttttcacctcgttttgcatcgagtaattagctgatacctttttatctcttctgttcccttattagctgtaaatgtggtacattgactgatttagggcttatactacacatcttgaagttgtcacactttcttcatgtggcattaggaagtctcatggtctgtaatgaggctttgtttttcaagtactatgaggtctcaggaaattttgctctgctcttctggctttgtaacccattgtcttataccacctcataagcctttaattgagggctctagttcactgcaagtgccttgcatgagaggaaaacttctgctggtctctgtttcctcacagttttctactgtttaggaagatccctaatccttaggacgtgtctatatttagtaaaatcctccaggggttgggggaatcgtcagggattatcagtttatcaaggaagaacctttcttctctataattttagtttatgcagtccctgcttcttcttcaggtgttcaataccatataaaacacaatgattgcaatttatttgggattttttattgttggaatggaactattggcctaccatgatatagctatcttacctaataaagattaattttaaaacaaatgaataggaattgttattttcaaaataatattgggttaatattttaaaataaaatcacactggctgggcgtggtggctcacacccacaatcccaggaattgggaggccacggcaggtgtatcacctgaggtcaggagttccagaccatcctggccaacatggtgaaaccccatctctgctaaaaatataaaaatttgcgaagcatagtgacacgtgcctgtagtcctagctactgggtaggttgaggcaggagaagctcttgaaccgaggaggcagaggttgcagtgagctgagattgtgccattgcactccagcctgtgagacaagagcaaaactctgtctcaaaaataaaaaaaaaaaaaaataaataaatgaaatctctcaaagtcttttaataaaaactgatgaattcagttaattaacataacttttgaatattattaatacatttgaatgcctatcaatatcttttattaaatgtgatttgctttcctgattttcatcttgtcttttctttctgattgattcttttatattttatttttgactcaacagtttcagtatatgaaatctccttgtatttttgtacttaaaatattattttatctaaatattttattaatattttaaaatttaaactatatttatctgccttcttgaacaatacagatatttcagaacactttaactctgattgtttctctataacttatatgttactatattaatctgttctcacactgctaataaagacatacccaagactggataatttataaaagaaagaggtttaattggctaacagttccacatggctgggtaggcctcacaatcatggctgaaagcaaatgaggagcaaagtcacatcttacatggcagcaggcaaagagagcgtgcacaggagaattcacctttataaaaccatcagatgtcatgagacttattcaccatcacaagaacagcacgggaaagacccacccccatgatttaattacctcgcaccaggttcctcccatgacacatggtaattatgggaactacaattcaagatgagacttgggtagggacacagccagaccatatcattccacctgtggtcccccccaaatctcatgtcctcacatttcaaaaccaatcataccttcccaacacttccctaaagttttaactcacttcagcattaagtcaaaagtccgtagtccatctaagttactttcctccagtattatggttttgtcgtttttcaacttcttgaattattagtatttgtgcacatatatatatatatatatatatagacagagagagagagaaaatatatatatacagatatatatatatatatatacagatatatatatacagatatatatatatatatatagagagagcacactctgtatttaccattaattttctcactcttcttgcatttcagatagattctggaatttttttcttctttttgtattatattctattaataaaggcatttgtatataagctatgtgttttttactaaaaatattttatttaacatttattatactttattgaagcaaaattctagattgacactttattttatttcaatattttgaagatattatcccatcatcttcaggcattcattgttgttgagaaatatactgacactatatttctacagaaggttttggccttcgttgataatatgcaaatctatatctgatgtaaaattgtttcggtcttagtcatttggggcaggtttaacaaattaccataaactaggtgtcttataaactgcagaaactcatttctcacagttctgtgagggctggaagttttagatcagggtccagcacaattgggttctgctgagggctcttttttagactgcagagagctgaagtctttttgtaccttcacatggcagataagagccacctagctctctacactcttctcataaaggcatcaatgccatttatgatgtctctatcctcatgacctcattacattttaaaggcttcacctccaaatatcatcacattgggattaaggttcaatgtatgaatttggggtaagcaaattcagtgcattgcactttttctctttgaaagtgttctgacatttcactacctagagtgaagatgttttttatacctcttctctagaaaaataattccgattcattaatgttgtaatcatttttgtgaatattgtcattatctcctttcataaatttcctttttcttgtgactttaactaatatcatggtagagcttcatatttgatttatttctcaaaactatcttcagtagttttcacttacttgcctctttcttcttcattctgtttaaatcttacagacaaatctacttccttgactttatcttcaactatgatttatcttctctacaatctatccattgaaagtttcgtttcaacagctttattcagtctattctttcacaaatttattcagccattcttactcctttctaatcttttctgaatcttactatgatggttaattttatgtgtcaacctggctgagccacaagacgcccagatatctgcttaaacattatttttgggtttacctatgaaggtgtttctggaagagattagcatttgaattgctggattgagtaaagcatattgccctccttgatgtggaagggggtgtcattatccaattaatcaaaggcctgaatagaacaaatggtggaagaaggttggattctctttctgccttactacttaatctggcggaaattattctgcccttggtgctcctggttctaaggccctcagatttgaactggaatctacaccactgcctctctggccctcagtcctttgtaccacagtaggagtcttcatgggtttccagtttatagacattgcattatggaactttccgctttcataattatgtgagtcaataatcttgtaatacctctcctctataagtataaaatatgctatgggctctattaggagaagtctaatatagattttggtgccaaaagtggggtgttgctgtaacaaatacctaaaaatgtggaagcagctttggaaccaggtaatgaaaagatgctgaaagagttttgaagtgcatgctagaagaggctgagattgtcataaaaggatttttaaggttattttggtaaaggctcagaaaaaaaggaggaaggtgggaaagaaagtctccatattcttggcaaagacaaaagtaatataaacagaattttgatagaaatatggatggtaaagcccattctgatgaggactcagatggaaatcaaaaacatgttactggataatagagaaaaggtcatccttgttataaagtgacattgttcttattttagtgttttaggaatggtagaacttgtaacatgtaattggatacttagctgaagagatttctaatcaaagtgctaaagtagtagacttggttcctcctaacttcttatagaaaaacacaagaagagaaaataacttgaagacagattaatcaaaaggaactagagattaaagacatggcaaattcttattctatgaatattgcaataaataagaaagcatgtttgggaaagaacactgagggtgagttcaatttaccctttgataaagagataaatacatgtgcaaaccatggacttaatcagctaccgtagcaggaaaattgccaattccaactgaaggggaaagagaaaggaatgaagaaaggtcagacttcttaggtttcataggctgggaccatagagctctttggctgtcaacactgctatactcttcaagacaagggaaggatgacccagaaaatatttggagatcataaggctgtctccttaggttcaaaattaggctcaaaatagtggggaagattacctcaggaaacttacaatcatggtggaaggtgaaggggaagcaagcccatcttaatggtggaaacaggagaaagagaaaggggaagtgctacacacttttaaacaaccagatctcatgagaactctatcataagacaatacttgagggatggggcttaaccattaggaaccaccctcataatccaatcacctcccactagaccccacctctaacgctgggaattacaactcaacatgagatttgggtggggacatagagccaaaccctatcatctctcttactggatcccaatgtttactggtggacactaataaattatttactgcaaagctcagtttggtaaagggggttggtgtttgtaattaactcacatggactacaaaaaactgtggaacataaaagcttaatctttgaataagactgcaagtcatagtatttcactcttatttcaggtgtcaattgttttagaataaattgcacgaaaatgtagcgacataacaatcattttaccatatctcacaattttgtgagtccagtagtaacaattaacctctgctctacacaatgtcatttggactacaacattcaagatgacttcttttctcatatgtctagtatcttagagtagctgaaatgcctgggggataaatggatggaatgattcaatttggcccataggtctaggacctcatttctcactctctgcttgtttcttccccagttggtctctcaggtggctttttaagcattttgcagcaggccggctgggttccacaagataaaaagtggagcttgctacactgttacaatgtctgagctcagatatcccaagtcatgatttctgatacaactattggtcaaaaccactctcaaggatggtatatgttgaacaggaggaaaaaataagctctatctcttgacatgaattaagtgtgcactcaggaagaagatatactattgagaaaattctttttttaagttttattttaagttcctgagtacaagtgcaggtttgtcacatacataaacttctttcatgggtatttgttatacagattatttcatcacccgggtgttaagcctagtacccattaatttgggtttaactggaaaaatctcaaacaaattttctaacttgtttccaaatttctttttacttgttttgattacttgaaaatcggaaagttatttggcttaatgtcattaaaaaatatttccctgtgcttaactgtgttgcatacctatctcatcttttgagaatttggcatagaagccaaacatttttaaattaaaaactaaaatctaaaagatatgtatgtgtgtgtgtgtgtgtgtgtgtgtgtgtgtgtgtgtgtataattatagctgttcctatttcgtttggatttaaaaaaatacaataataaaatttgactgttattaacattttaataatttaaaatctagaaaattgaaagcaagcttttgaaaagttaaaaacatttcagttgtttcagtaaagagaaattacattttcctttacatgtttactcaatatgtatttttccttctattacatttttataatgctcttttaaaatattgcttttaatgttcttataatcatacaaagatacatttacacagatatcttttgcccttcaagcattttctttcaagataaagtcattttagtaagcttagctaaattaatgagccagaagcattagggcaactgaccaactcaagtattcttattgctttattcagtagaagtagttcctatgattttgtgcttaattcactccatttcactggttcccaaaccatgaaaacattaattttattcaatacttttcttggcatactgactgaataactttccaaggaatgagacatatggctgacttatatctgatctaagaagattctgtcttactggaacataattttataaaattaccaataagtttgtatgtctagaaaaaatacaaagatatgcctattatgtacaacatcaaggccgttaaatctttatatctcttaaactcaatgacaaagagaatattaacaacattcttttgtcttttgcaagtaaagcaattttaggtaagtttttaaaataatggcttagagaagacttaattattgtaagtaaaattattcttgttactcatgaaatttaacaaatatgaaatctcatttaatgccctttggaaaagttcggtcctccaccatgttttgtgacgtctatcttactttatgttgaaagtttttaggttgttggtttgtggattccttattacaatctttaatattaaaatattttgaaatatgatagagtgagaaagagaagccagatagtatcaaggtgtccagcagagcaagcactagagttgaccatcagtggaatccagagacagcgtaaacttggcagatggaaaaaattatttctgttcactaatttctaattgaaattaccatttctacatgaagatatgcagcagattataaaactatgaggattaacttcaggttgaatattcctcatttgaaatgcttggtatcacagatatttcaaattttaaaaattttaaacgattttggaataatacacaaaatgagatatcttaatgatgggaatcaaatctaaatacaaaattcatttatgtttcatattcaccttatttatatacatggcctgaaggtaattttatacaatcttttaaatgattttgaatatgaaacaaagctgtgactgtgttttgactgtgacttgtcacatgaggtcaggtgtgaaatattctacttttggtgtcatgttggtgctcaataaattttaaattttgatgcattttgtatgtcatatttttggatgaggcataatcaacttgtattacttgtcaccaatataaatcacatatttttcatataagccaacagttgttccagatatctcaaataatatactggctaccactttgaagttataaaggttttagaattgctgccattatttcttattaatgtattaatgaataaatacatgtattaatatattatcaattgaatgtgtaagtatagatttcttataaaatgcatttaatttcatgaattcgcaaatctgctctaagaaacaggtacatgaataaacaatgattaagaattcctctgattctctcaggatagtgtggttgttatctgatgtttatgaatcctttctccatcttccatttcagatttctcactgtagctggtacaaatacctttcctagtgaaattactcagattttaacttttgaattgccttgcccttgacaaaccatatttgctaaaattgttctttaatatgatctggcataacaacacaccttctgtcaaatgtataagcaaaatgtatgatgtgcattttcaaaatatatcctgacaataagtctattcattctgtattttccagcatggtgtacagcctatcaactctaatgattacggtatctactataaattgtcattatccatgactcactaggcattaaggtttttcatatcatccctgcttctcaccacctttaagtgatatttctttggaccaagacattatcttcttttccctcattattgcaatggaagtcaagctgttcttactacttctagcactgtctctcctccaggtacttcatcacactcagagatttgcttcttctgcatgaattaaattatgccagtactttgctgagaatacttcaatatatacccaaaccgttcacaatgaatagtcagtatgccaacaatctttacttatgaccttacacaatcttattttatgacttctttttgggcagtcttaattgggttttctgcctatggtctcacaaaggtaaaatcaaggtgttggtcaggctgggcttttggccagaggccctgggaggaatttgttttaagcttattcaggtagttggcagaatttggtttcttgtggatgtaggaaggaagacttcatttccttgttcactgtcagagaggactcaccgtatcttctagagaactccttcctctttaaatgagcactgcaacattaaattctcctcatgcttggatggctttgacttccttatcttctaccagctaaggaaaaaacaaaccaaacaaacaggaaaaaaaccctcttttgaaagaccagagattaattatgcttattaaattcatttctattctgaaagtttatcaagcaaagtcaactgattagtaaacttgattacatcatcaaaatacctcttgcatttaaattaatatagtcatggactagatagctcatcataatcacagtcctagctaggaattagtcatggaaacattaagttggccattttagaattttccttatgacaagtgtagaatacttgggaatgaggatgtattcattttctactgctatatcaaaatattaccataaattcaacagcttaaaacaatgcacatttattatcctgccatttccaaggactccagcagccttgtctggattatttgtaaggcttccatcaatatgtccacctgggttggattctactcttgaaatttgactaaagaaggctatgtttcatgtttatgttattgattgtagaattgaactccttagggttagcagtagcctcttattttcttgccggctattgacaggaggccaccctcaacttgtagaggccagtctcagtttcttgcctcttgttcccccaaacatagctgtttgattcatcaagccaacagggaagggtctccttacataatgggcattataatattatataatgtaatcatgtacatataatctccacatctcattatttttgccttattgtattagttagaagtaagtcatgggttctgccatgaaagaagaggatattatgcaaaggagtaaatactaggagagaccatgaaggggacaacttaagagtgttttcatggcagagaaattttggaaagcaagagtaggagtggagagaaacatgtgtttggagggggagagagaaggagaggtgagagagaggtccatgttgttgtgggtgggtgaagaactaatggcatttaagttgaattcaagtatgtgtaaactgatagtacttctttattttatggtaaaatgcttggtcttttattctgtattttttcaagtaattattggtttctcttgctagcacttccactgattaggaatcatagtttcatatcaataaaatattttttaaaagtgactgaacattgatagcaatatattattattcttagatagaaatagaaaatgaatcaaaaagtactggattaaattgccataaaaggttaagaatagaggtcattttcttatcaaattaagtgtttccatattcctttattcaagaaatcattttaaaaatgtaatgtatggaaatgtaaacctttccataagtaaaaaagaatatatatagttatttataacatataatatatatttataatatatattatatgttatttattttcttccttctgccataatatatattattatgaatataatatatatggcagaaggaagaaaatatgttcataatatattatgaatatatgttttatatattatatcttttatatattatatttataatatattgtatattttatataaaatatatattgtatattttatataaaatatatattgtatattttatataaaatatatattgtatattttatataaaatatatattgtatattttatataaaatatactatatatatatttttttttttttttttttttttttttttgagacggagtctcgctctgtcgcccaggccggactgcggactgcagtggcgcaatctcggctcactgcaagctccgcctcccgggttcacgccattctcctgcctcagcctcccgagtagctgggactacaggcgcccgccaccgcgcccggctaattttttgtatttttagtagagacggggtttcaccttgttagccaggatggtctcgatctcctgacctcatgatccacccgcctcggcctcccaaagtgctgggattacaggcgtgagccaccgcgcccggcctatatatattttatataaaatatactatatatattttatataaaatatactatatattttataatatataataatatatgtaatatataaataatataatatatgttatatatattatatataatatatataaaatatatactcataatatattatgaacatattttcttccttctgccatatatattatattcataataatatatattatggaagaaggaagaaagaaaatataaaagtatgttcaatcaaagcatgcaatactttggttgaatgtgaaaaaaacagtaaaatcaaaagaaagagattttgagtgggaattttttaaattatataggtttttacatgttacattaaggatattatatcctgaattagttgggaggttactttctaaaaggtatctaaaattatttttaattaaaaactcatagtgttgataatataaaataattagctttggatgatagaacataggaaaatcaggagtttactaaaatagatcaaactatataatgaacatatatatcagttcaaaatatcagtaatgataaggtaggggaaatgccttctgggatttttaggaggtgttgatagaatgtgtcatacaatttaaaaagaagatgagtcattgatttggaactacatgaattaagcaaattgtgctgaaaatacattaaaagggaatttaggagaattcatttgttaaagattgaggagccaggcaaaatatttaggtttggatattttgtgtttgatatttgaaaagcatcagcatgcagaagacctgcaaagccatatgaatgagtatcatattctatggaagaatttatatgcaatgacaacttttagaattccactgaaagctactgagaagtaaatatcaaaaatgaggagaagaaggagataatggagtataagagaccaaggcagagaacaaggagatagtggagtataaaagaccaaggcagtttcaggaaggaagctgtcaatatgtcatatatggatgtcagaagaaaaaaaaatcaagcactgtaagtataaaaatatttattgaattttacacttgggaataaatatttttaaaatgagttttggaaaatttttgaagctagaattcattttcttgtagtttaacagtattgtgagtggtctacctttagtttaagattaggtgagtagggccatataattaaacaattaaatattgagaagtgattaggtagaaagagaagaaaatacaatatatttcgggggtgttcaatggggtatataagcctaagaaattaacaacaggtgtcttagtcccagtgtcttagaccatttgtgctgctataatagaatgtaacaaactggatcatttataatgaagacaaatatattggctcatgattctggaagctgagaagtccaatatcaaggcacgtgaaattttggtgtgggggaagggaccagtctgtattctcaagttggtgccttgtgtgctgcatcctcaggaaggagagaccattgtttctcacgtggcagaagagtcaagagagggagcctgctcataaaagccctttgattagggcattaactccacccatgagggtggagccatcatggcctaatcagtttttaaaaaaactcagctcccaatatctatacattggcaattaaatttcaacatgtgtttcagtgaggacagacattcaaatcataggaacagatgaaggcaaaaaagaccaaggaacagattttatttcaatattttgcttaaatctgccctaaagccttgctattcaaaatgtggactgcagaatagcagcatcagcatctcctcagaatcccaggacttatcacatacgttctgaataggaatcaacaggttaacagtatgtccaggtgaaatttgcattactcttaactatccggatgtacgcaggtctgaacactttaaagaaaaagcatgttctgtcaacagcttatgacaacttatattgctgctcacttagtcaatttcataatccaagctaattcaatgtcaaacaacttgtacagtaaggtaactagtttaaaaaatatatttgtaaagagtacctactggatttaactgatgtgaaataaacttgattgtcgttgttgagtaaacagtctttagttatcttattatttacatcttaaaactccagttgttctcaatagaggaaactaaagacccagaaagagatatataattaaaagctgtcaccaaagtgtgcatttagcataccgtaaagcaaaattcttctttaactaatgggaggttgaataagaggttctggttcctctgcaactaaaactattacacatctgagaatacctaaagcatattccttaaagacttcaagatcccaatacgtcaataagctactattaaattggaatcatatgaaaactaacataaacccagaaaggatgccatattgttgcactattgtcttgattctccagtactgaaatatgaattacatttacaattaaaataaataaaagatatttataccatctgaaataaaactaatatttttctatgtgaactaagaacataaatgtttaagataatgttctattcaaacaggcaatcatgaaatggaatagttaattgtcaataactgtataagaaacataccttaataattgtatacaacaagattttataatataaaaatttaaacatacaaattatgtgaaaaaaagattttaaaaggtttataacatttcctcaactttttctaaggaaacaattataataacaaatgatactatattcattttaactccagtcttttactcacttatactaatattttctgaccatgtattttggaacaggcaatatgctatgcagctgggatacaatagtaacatgagaatcactgcctcccacgagcttgacattcagagaagatataactaaagtgatgaatttttgttcaacttaaggtagcagaattacatggaggaaagtgaatatcgatttagaattaacgatcactctccattatcagataagaataatttaattgaaatggttactaatactatttttttaggaaataaactttttttatatacattagagtgattgaaaactagttactaatcatgaaatctgtaccccccaaaaaatcctgtagcaatgctctcaaaactttaatgtccactggttgaaataaagattctgatttgctggatctatggcgaggtcaaagatgacaaatttcaagcaagttataccaatgttgctggatttttcttttaattgattggcaaagttgtataactgctgagtcactgtttctgtttccttcttggagccacttttcccaaaaaatgaatgttcttgttagattctttaaaaaaatagttggatgtctctgtacagtgaatatgttaactgtggttaagactttgcctgtggcttttgagggcttcatttgctctggtcttttacttaagcagaatgaactttgcaactttcctcaccaggaagctgctttgtcagtgcctgaggttagtactgtgtgagcaggtgtacacaattcctgtattggaagaaaaagcagtgctttggagcaagaaaactaaaattgtccgagtcttttacactttgttactggaacacttgccacagttaaagaaatatcagatatcctgacaaaagaaatagcaaatgccctgacattttatttatgttcagagtaatttatttttataagaaccacgtctggaagaaagataaaatgtagctaaaacgtttacaatcaaagcacactgaaatagagagtgctattgtattgatgaaataccccttatcagagcagactcacagttttgtaaatatgactatattgttaaagataaaggaagtacttttacttcaggcagcccactgactgaaatacacaatgcaaaaataagttactattgtatgctaaaaagactcttttacatattcttaaactccattcaaaataaaatcagcaccagaagaatgttagaccggaataaaaagaaccaattgaaatctgagctcttttgtttagtattcctgagatgtcatatatgacatacaatttctgagtatctgcacctttaaaaaattaaagataaactttttatgtcgtttccctttgagacgatgaagagtaaataaaaaataaaagtaaaatgttttataaattgcaaattatgatgtaaatgcacagcatcattactatgtgatgtttgcctagcttatttcacttaacataattactataacatttgaaacgggggaaacaatgacttacttcaacactagctaatagcaaaatgctacatcaggatggatcctaaatgtaattgatccactataaagaggaattttttaatgtgcatatgttgccttctggaatgacatattttacaataaaaatgaaatgttaagccaaattaagattttcccttcaaattcatttattttattgcagtattttgacactttctatcaatgccttagcaataaattaatattttctattaccttgtaattatattattacaatggaatctaattctttgcaagatctctgaaagaataaagaagctttatcatttaaaatctttttttagaaaaattatgttaataaataagacctatatatcttcaaccttactattatgtatttgacttgtacttttagacaaaatggaataaatctttattaataaattctgctttttatttcatggatgtttacttaatctaaaaaaaaaaatcttccctaagcctattagataggctgggcaaaatacgacaaacaatttttcaaagcttgcaataaaggaaagcccagaaaataaaaaacaaaaacaaaaaaaatggttggtaggcataaaataaaatgtagattctcctaaaaatgtttgtcaatgacagagtcttaacagcagcccagtataagggatacaaggccttgtaacctcataaagtaagaagctgaaacagtagcacctcagaatttgtgaccacaagagatacacactcaatgaaaaggtaaactttacaaagtccaacctggactacaaggaaaagataagttctttattagttttagctccaggtagtggaaactatcctctcaagaggacaggatactttagccatgttcttaattatatttgggatttgaatttttattgtaaccttataagacaacaaatacctttaaagtgttttcgagttggtagtaactggggcacctggcagcagcaaacacaaattctctctaaaggaaatgcctattagcctaagccctaagaattactactgattaagatcattcaaatatacgtttacaaacctaaatttcaacatataataaataaattatcataagttagttttaataaaacaaaattagacaactaagtatttcagatatgtaaatttttatatatatacactataaaatacatgtaattttttaatgaaagaattgaaaatatgagcaaggaatatgaaatgagaaaatatcagaagacagttttaaaattaactaataagaacttgtagaaatgaaaaatgtattcactgaatttaaaagttcaatggatggtttaatctgaagattagacacagccaagagatgagaaatgagttggaagatataactgagcatgcgtgttaagacatgaaaggcaaggaatgaaaattctgaaagctgggaagagttgagaggcatagattatggaccaaatgagaaggtttagtatgaatccaactggcattctgaaaagagacaatgcagaaatggaagagggaagaaacaagatttaacaaaaaaaggctgtgaatttccccaaattgataaaaagcatgcatctgtattttcaggaatcatactgaaaccaagaaaataaatttaaaaaaattttcacctggagaaattatactgaaaatttagaacactaaaggagataaagaaaatattaaaagaaaaaaggcaggctacttgtaagaagcaaagattaagtgaatacactaaatgatactacgaaacatcttcagaaatgaatggggattataaagaaaattatcaggatattcatcagtattggtcaaggatctatgagaatgtgatttggaagagctaaaatggctaatctcttccttaaatagtttgatgaattgttggttttcatgtagtaatttgttatatttaaatatggaataaaacattaaaaaatctaaaatactgtaattctaataaaaatgttgtaagtcaattgattaggaaaagagtatacttggatagagacttaaaggagttagtatttgatcctcaaaattagtatcaactctcaattcctgaggctttacaatttgttaagccttcttcaaaggggcataaatgtattaactccattagaccttacactaactcaatggagtatataattttgtttttccatcgtactgatgaggaaaataaaacacaaagcaattgtccataattaggtttgacttttggccaagtatttgcttagaaagctatcttttagaacatcaggaaatcaatctgtcagagctagagaacacttaaactatgagcacccaaaattacagctttataattgtaagaattaaaatatgctctatttcttctaaaatatttttccataaatgttttaatatgcaaaaagctattctaaatgctataattttcatttatcatgacctcaaaaccttgaatttatattcctaaacccaggtctatgcagagtttttgatttatactatactttacaaaatatattttattctgacatccttgtaaagctatttgattgtgatgcagtttttaaaattatgatataattagctttgtacatttataccttcagcacatgactcaggattttctgcatatggtaagaaaaattgtattatattgaatagcaataacttcatgaataaatattcaagtaagtgaattccttcatataaattagaaatggtaaagcttgataagattactttcagttaatgcatattcttattccttctgtaattctatgaataccaatacctgagtaactatcttcaatgaaaatcaacccagaatatgagtaacatgggaaatgatctgttcctagttaatcacccttaaataagatactttttaccgtttgtaaatatgagggtaaatacatacatttataagaaaattcctagcttagactatgtcacattttcaagttacatctttatataacattctcatctcttgtagagtatgctcactaaacaaactatgtcaaatgagacaatgcatgctgtggaaacaaaagtgacttaatcttggatgctaatccttcttgttcacttcggattaactccagtttcacaaatgcctccagatttctacttgatgtgctgtccttagcataagaacatgtcaatcttgatacaaatcatcagcatacggcattcttagctgtcctggagggttgcctttaattgtcgtgcacagagcatatactgtttgcagtggtatataagccctgaggctggggagtaacagtttggggatctacctgtcttgctgccacctgagaccatgcttctatcagtaagttaccccagtaaacaaactggatttctctgcctccttctttggtttgtcacatctttctgcatttggaggttgttatgtaaagatgaccctttcacagaacacatgtgacaatatataaaagtatacattacttcatcagtatcaaatattattctgttactactacttttattaagctacagctttccttctttttacagagtggcagaggcaatatataattatataacaaattataatagaagttgtgctattcttcagtctttgaggcaatgttgtgttcaaatcatgttttgcatagaagatatactacatttcaaactagtgtgacatcatttcatcaagagcatttcatctcttcactgaaatttgaaataaagattatggatgccaccaacatttttaattatctcctatttcttactttaaaaaaacaacaaaagaataatcatatgaaggaagatgggccacagctcattattttcagtttaaaaagtgagaaatgatgaaaattagaaatctttatagaatttagaataaagaatataagagtttgatagttattagttaactgggatagtaaagaaatacgagtaacactatggcatttataacttagatgaaatgaactaattatttaaaagacacaagtttccaaaactcacaaaagaggaaacagatcatctaagtaggcctattttacagcatttgaatcagtaattaacgattttacaaagagaaagcacaaggtgctgaagagttcaccagtaaattctaccaaacattaaaaacaataaatactaccaattctccacaaactcttccataaaatagaagcagaaagaatacttcctagttatcctaatgtcaaaatcagataaaaacattacaggaaagagaaactatatatcatcatctctcgtgaatgtagatacaataatgttcaacagaaatatttcagtacagttcaacattataaaatctatcaaaataattcatcctatcaacaagctaaaaagcaaaaatcatatatcatttgatgtatgaaataaaagacacttatcaaaatgcaatgccctgtcatgataaaattgttcaaactaggacaaagggggactttgtcaactctataaagaatatctacaaacaacttgctgctaacatcatgctgaatggcaggacacttgaccttgtaggatttggaacaaggaagcgatgttctcttaccacttttatttgacatcctattggaagtcttagctaatgcaacaagacaagaaaaagatgcaaacgataaggggggaagcagtctttgtttgcagatgatatgattatctatgtagaaaattccaaagaatgaggaataacagcaacaatgtctgtaatgacttaagctagtataatgatgccacaggatacatagtgttatgaatggaaatgtggcctcccaaaagaaatcctgaggtacctgtgtatgtaactttatttgaaaagagggtcttttcagaagtggcaaacaaaaggtgcagtcattaatggtggaccttaatatgatatgactggtgtccttataagaaggagaaatttggacagacacaaaaagggagaacatcatatgacaacagaggcagagattggaataacgcagctgcaagccaaggaaggccaagcattgaaagccaatatctgcagttaaaaaaaagcaaggaagaattctacatagaaggagcatgaaccttgaatatttacttccagcctccagactgtgagagaacacatttctattgttttaaccacttagctgatagtactttgttatggtggccttgggaaacttacgcacatggtttcaataaaaaagtcaattatttggctgggcgcagtggctcacgcctgtaatcccagcactttgggaggccaaggcaggcggatcacgaggtcaggagatggagaccatcctggctgacacggtgaaaccccgtctctactaaaaatagaaaaaataaaattagcggagcgttgtgctgggcacctgtagtcacagctactcgggaggctgaggcaggagaatggcatgaacccgggaggcggagcttgcagtgagccaagatcgcgcctctgcactccagcctgggcgacagagcgagactctgtctcaaaaaaaaaaaaaaagaaaaagtcaattattttttgctataacagggataaatacatcaaacaaaatatgtgcaggacttatattaaaagacccacaaaactctgatgaaagaaatcaaagagaaactaaacaaagagcgatagcccatgttatgaatttgctaagatgccaatattcccaactggctatttagattcaatgtaatccttataaaaatttcattgaactgttttgtagatatccacaaactggttagaaagtttatatgtaaaggcagaaggtctagaagagccaacacaatactgcagaaaaacaaaggaaggggattgacactcttgattcaagatttactctaaagctacaacaataaagacagcgtaatattggaagaaggatgcacatggaaattaactgaccagattagggaggccaaaaattgacctacacaaatatagtaaactgatctttgataggagcagaggcaattgaatagagaaaggatagtcttctcaccaattggtgctggaacatttggctgtccatatgtaaaagaaaaatcaacctaggcatatacattacacatttcaggtgaattaactcaaactagatcagagacataaatgtaagcatacaaaactaaaaatctcctagaagcatcagaagaacaaatctagctgaccttgtatttgtcaatgtatttttagatacaataccaaaagcgtggtccaagaaaaacagataatttgatctttactaaaactaatacttctgtgaaaaaccctgtgacaagaatgaaataacaagccaggtgtgacagtacgtgcctgttgactcagctactttggaggctgaggcaggaggatcatttgagcccaggaatttgagaccagcctgggcaatatggggagacttcacctctaagagagagacagaaaaaaaagaaatgacaagacagagttcagataaaatatttgcagaagaacatatctgataagtaactttgtatccaaaacactcaaggaatccttatgacccaacagtaaaaaaactaacagcccaatttaaaaataggcaaaagtggggaggctgtgcatgtgtggggacaggggctatatgagagctctctgtattttccactcaattttttttttgtaaatctaaaattgctctgttaattaaaaatgggcaaaatatctaaacaaacgcctcatcgaagaaaatatagttggcaaataagcatatgaagatattttcaacatcatttgtcattagggagtcacaaattataacaacaatgtgatatcactatacacattttaggttggctaaacaaaaacaaaaacaaagctggcaataccagctgcaaatgagaaaaaccagaatccttcctcattgctggtggggatacaaaagagtaccacgttggaagacaatctggcagtttcttactaaagtaaacatggttttaccatatgatccagtattgtgctactccatatttactagctaatttgaaaaatgtctaaaaacctgcacttgaatatttatagcagatttatttataagcaccaaaaatgattggaagcaaccaagattttcttcaataagtgaaagtataaacaaagcatggtaccccaatgcaatgagtattattcagagataaaaagaaataaagtatcaagcgcaaaataatatgaaagcatcttaaattcatggagcaaaatgaaaaaagccagtctgaaaaggctatgtactgtgtggttataattatacctcattctagaaaaagcaaactatagagacacaaaaagatgagtggctgtcaaaggtatgggggagatagaggattaaatatgtgaaatgaaatattttaggatagtgattctattatgtatcacactttaattgtggatatgtgagactattcctatgtcaaaacacattgagatttacagcacacaatgaactttaatgcatgaaaattataaacatttttacaagtttggagaaatcacaagattgaatgtaaaataatatatataatctaactgtattgcaaatatgtaaaacaacctcagtaaaggaggtaggagaaaaaggtgttgacctcaaaataactttggaaatgagtggaggtccataaaactaatggcaagaaattgtacataaccactgaagcttcgttgttaaaattttattccacggtgatacaagttaaaaattctgatagtactattcatgtatactggaattgaacaactaagtagaaggatgagaaatgttgggagccagatttctccctgttggaatgggaatttatagataaatgagggaaggaggggagaatgatccatagagtaatggattagaattagaaacatcagtctgaacagatgtttacttaatatggacatggatggttacacatataaatatttaaagagatgtataaatccattggttagtatatacatgcatatattttcttgttctaacagctaagagagaagagaagcaggatatcccagtagcaataaatatatggatacctaacctgttcttgatttctaatattctttaataaaaggaaccaaggaaccaggtgtctttggagaaatgactgactttaacacttgggcaggaaagtttcaagatgaacctggagcattttgcagtgtcagaaattaaggaaatgctgtaaaaacaaacacacaaacaaaaaaactccttcacacaactatggagtatgctaaaaaacacaacacaacacaacaaaacaaaacaaaacaaaaaacacaggagccaactgaaagagctcccagtggccaaacctggaaagattcgagtgacaataaataaagcaatattggattctaatctaaaaaataaaatacatatccatgaattcatgctataatcaattaaggattgaataaataaatacatagattcaggggagaaaattttccatgcagaaaatttccaaattatttatgtagataccttgtcctcaaagaggtgaagcatgactcctcaccccttaagtgtgggctgtgcatagtgactttcttccaaaaaatatgatatgaaaagttggagaaaatataactttacagtgaataaagctgatgaacattactgcaggcaggtgataaaaatcatcttcaactatgataagtgatgtggatacaatatatccttggtaggatgttagtaaaatagtactttacttctgtggtttttctcccaaatgtccagaaccctggtctcatcctgagaaaaacttcatacaaatgctaatgtatgaattagaatgtgggacattctaattatctgaccagcactcttcaaaactgtcatggttatcagaaacagccaaagtctgagaaaacactgcagaaaacggagcctaaaaaggcatgacaacttaatgcaatgtggtatcctgaaaaagaaaaggagattaggtaaaaactaagaaaatccaaattaaggatgtcctttattcaataataatttatcaaaattgggtccttaattgtaacaagtgtactgtattaaggtaggatattaataaaagggaacactaaacgtgtatataagaaccctctgtattatattagaaataccctgtaaatcaaaaactgttaaaatgtattaaaattattttcagaggttaaaatgtcttttatttatgtggatattaggagaaatttctgtattgtaggtttattggatgataaggtacttaataagtagcagtatccagcctgctttctcttcttttgtagtagaaataaccatgaaaagaagcaaatctctgacagaaatctaaagtttcaagcaaagtgtaacattagagaagtataactaaaaatattcaatgaagaatatagagcagaagggagagatcttaaaagagcaagcaaatagaaaacaagttataaaatggcttacaaaaaccatatcatatcaatagtcaccttaagcattgatggaccaagcactaacaaacaggttgtcatctaattttaccaatttctgggtagtatatagcagataaatgtaagtgtaatggatactgtctttaatttttactgtggcttatttataaacacttattcagagacaaaaaacaagcttgactttgtaaatgtacagcatatacaagcatactcatgcataaactagctaaaatgtatttgattggtttttaaaacttatgtaatataattgcacatcaaggttacaaatctctgttagaaatttttgcaaaatctcaccattattatttaaggttgttatttaagaataaatgtaatgtatggatatatttgataatcatttttaatatacaacatttcaaccacatatataagcctagttcaacaaatattgtatgcaaatagtttaaagtctaactaccttctagtatatttacttaattcattttcattaattcagacccagagattgtgaataatatataaaatttcaattgaacatatacatatattctccatttgcagattaacctaaaaatagatataatgtttagtttttgaaatctaatgatttatggaaaatgcactggaaatttgcttgcaacatacgtgtttgtgtgtgtgagtgtgtgtgtgtatgtgtgtgtgcatacttgggttatggatttggctcaagatattttaattggttgaggtcattcatgcgatgtttaaaaaaagtttttttttttaattttttcaaattaaaagtggcagagccagtcagccttgaaatgattgacaatatccactatgaactgtaatcaagtacatttgagaaaagctcttctttaattttctttaatgaagccacaaattgaagctattatatgcaaagtaattagtagcaatgtttaaaatattaatttttagactatgggttgtacatttaatatatccttagtatttaacttctgatatttgatctatgtctaattttgaaatttattttagaataaaataggtagattaaaattaataaaaatactatatttttcatattacaatgtttttgcttggtataagaaaatctgttcattaatgagattttgacattatatgaaaaatatatcatcatttttattagcttaataggagaaaaattgactttatttttctcaatttcatatttttaaattgtggacaaataaaggcaatggtagagcctaagtgtgaatctattttatactgcagatatcagattattttattactttgggttgttaaattttgataagcaattatgtttagctcttcaaatgtaattaagcattggtatatttcaacccatggatttcatcagtgacctcttcatccagaagttgcctgataggatttgctgaaatattgtggcaactacattgagaaacaaacaacaaaatctgctaattatgaaaaaaaagcagcaacaaattcagctctgaggccctcagatgtcatattgtagctggattaagacacctagcaatttaagaaatgtgaattgaaaagacatgagtcagccagagtatttcagaatttttttagttagttttgaatgaatattcttgcctgtaaacataaacatttagaataaaggtattgcaatttatatttatttatgaaaatactcatatttaggaggacagtatattaatactatcaacagagttaaacattgcaatgcccaggtttcaggctgaaatattattgctttgccttttgatgatacctaagggctcatatctgaaatgatatgttaaaaggcccgtgagacctaacagtgaacttagcatacaaattggaatttttatttatttaattttaagtgattcaaatgaatttttattgcaacaagacagttattattttctagaaataattttctagaaatttttgaatgctaaatgtttgctaaaaatactcaaattttctttaattttttgtgaaaattatggatattttttagaggttttcccctaatgataatgctgcctcattaaattttttattttatgattatccagataccatagtttcagatctctcatatggctattctacccatatagtacaatgagtttaaccctcttccgctaacatactcataaaggcaaagatcagtaaatgttcaaccctgaggtacctgacaggggagggaacatcactgaagctcttttagaatagagaagtttgaatccctcaaatcttaggattcaggtgaaaaatgtcccatgctatcatattccactgttttagcatacggttagcatttcttcaatttttttctaaaattgacacttaaataagaggctccaattttattttgtggcttctgatacctctaaatgtaaacccctatgtcatataaagcccacttttagatgcaaaacctagaagatatagattattaccttcctacaaataccatgagtaaaaatattaaactccattggaaagcagaaatggaaagaaaatggttctcaaatttctgcccccggaatacacatcatatgtaattcttcccccttaagtgtgagcagaaaccctgagtatgatgagatgtcattcctgtttatggtgaactgtatggcaaaaatattttacagatgtagttaaggtttctaatcaaaagagaggttacttgttatcagacaagccctttgaaatagagtctaggctgggctcagtggctcatgcctgtaatctcagcattttgcaggctgaggcaggaggactgcttgacctcaggagttcaacgtcagcatgggcaacgtggtgaaacccagtctctacaaaaaaaaaaacaaaaattaggcagaagtagtggcgcatgcccatagtcccagcttcctggggagctgaagtggaagggtcagttgagcctgggagtttgaaacttcctggagctgtgttcacaccacttcactcctgcctgggtgacaaagtgagaccctatctcaaaaagtaaataaataaatgaaattaaataaaatacaataagcactcaatgtaaaagaccggaagcaacagacttctttccccattcttctgtctcttactcttaatatcactccctcactttctgctagctttgaagagacacagcacaatgcattctataactgaaaggaaatacattttgccaacaaccacgaggtagaatgagaaccataagcttcagatgacaggacagttaccactgacactttaattgcagccctgtgagaccctgaacagaagccatagcaagtacttttaatataaaagcaagctctttttatgttaatatattcctgccctaaacaaatttgttattttactgtattactgtttttcatttcaatctgcaaaacagacatataggtcctagttcttaattgtgcttaaaattaaataattccaaataataatgtctttagttgaatttgaaaaaataggcaagaaagttagaaataaattaaataatttagatcaccattgaagaacatacctatttcaggaacttttttgacttctaacacctaatgtgtaattataaacaatttttttctcttttctttgtaatctaaaatacatagtttaaataaagttgtattgccaaattgttatggaaatcacaaataacatgctgtataaggagggtacaaataatgtaattaaaaatagttttattttgtctcctacagtccctttaatattcaacgtggtattatcttttccccttgccattaaataaaaatttcaggtggctcaagggttattcctaggaaagataaaatttcatgttcactctaaactggaaaaacaccatctgggttacgaaattagaatgcttatccaaatatctttattcagaacttcaatcatgatttttaaaaaatgatactcattcctgccttctccccgcaccagcaagggcttggcagcagagccttgtctagttcagggaaggaggttttgtccctcttcccacattcttcctcaccatatccttctcccaaagctactataatagaacttacaaaatttaaggatagggaaggtagcagaaaggtcagcttctctttaatccctgctgtaatgaagtgaggttgctccctggtgagtattttcatggctgcttccagcctggcctttccatgtgtgactcctttgatgggcagtacttggcttcaggtggcagtttctgtccctgtttcaatttttaattattttcaggcattctaacccgtgtaaactctcactgttttggtggtgcagtatttatcaagcaaatcttttaaagtatccattttaaattatcccagtctaacattgctccctggagtccaagtctggtcccagggtttcatgggtcttctacaggtcacagaggggtttgcagtcatgttcaaagcagcaccgactctcactcagagtctctctctttcagcctatccttccctctcatcttttccatcttacaaataaccacagactactctatgttagctcagttattcaataaacactcccaatttaacaccttgtcacactgccagctaggtcggggagaccctaacccagcagcgctagagaaattaaagacacacacacacaaatatagaggggtgaagtgggaaatcaggggtctcacagacttccgagctgagagccctgaacagagatttacccacatatttattaacagcaaaccagtcattagcattgtttctatagatattaaattaactaaaagtatcgcttatgggaaacgaagggatgggccaaataaaaggaataggttgggctaattaactgcagcaggaatatgctcttaaggcataaatcgctcatgctattgcttgtggcttaagaatgcctttaggtggttttccgccctgggtgggccaggtgttccttgccctcattcccgtaaacccacaaccttccagcatgggcattagggccatcatgaacatgttgcagtgctgcagagattttgtttatggccagtcttggggccagtttatggccaaattttgggggacttgctcccaacatcacacatttcaattcttatcttttctatccaagaaaagggaatacaagagagtttgatgtcatttgcaattgtttgtagcagaaaaaaatgtttttgctcatacttacaatcaccagatgtgactgaaggaaatagatgaataaaatatagtgttacttgctgtattacagacttagggatgaatatttcttatatatttatattattcatgttatgtacaatgtttatgcattatacttaattcagaaatcaaccaaacacaatgtttatttttaaaaatgcaagcacgtttaaagtgaaggaggtttctcagtatacctttcaaggcttctgttattgttgcttcaattttttgctgggttatcacttcaatctcacaaatgctttccatgtaagactgggatgtgaacctgggtcacaggagacaccattccaagtctcagtttcctttgaagattgttcatcctaatatgaagtcagagaaacatgcactggtgttatactccctgcccctttgtcctgtcactgaagttataatgcttataggcttcagagagaagtcttctttcaacttgtagtttcattttcttaacatggtaaatatgcctagctaactacatttgttaaggctggtatttaaaaatgtcatcagaccttcaaagtgtaaaggatcttccacagtgaacagaaatagacaaaaaagagatttgtttctgaccaatttctatggttagttatctcacaaaatacaggattccttcaaggcagtgcttacctctttaaaagttatctgtggtaagagtggcaagagtggtaagagtgaaagaccagaattctaagtttcttatacatatttttaatatttggcaagcacacatccttaaagattttctcaattataaaaatgaagtttgggcattaacttagccttgtaaatatgtatccaagactgaaaaatatcttgaaatgtgtaactgctcataaaactttgaaatttataattggtcataaaaataaacaaacataaactcttggataagggagtgaaaactcataatttaatggagttggttagctgaatgatccgtatgtgaacagcttacaatattacttagaacaattgtacaaatggaaacataagcaatggtttttttataatttcctactcaaatttttcttcttaacaaataaaatggtttagttgaaagtctatcaagatttcaacattaatttaaatgacccctcctttcagatttaaagtgttttttaaatctttgccctcactagatgtcagcttttatttataacactgtatcatatacatatgtatatgtacacatatcatatatgtatgcatataggtacagtgtatatgtaatgataaatctcactttgaattgtagtaatccccatgtgtcaagagtgggaccaagtggtgataattgaatcatgggggtggtttcctccatgctgttcttgtgatattgagttctcacaagatctgacggttttgtaaggggcttcttcctttgctcttcaaacacactctcttgcctgctgccatgtaagacgtgcctgctttcccttctgccgtgatcgtaagtttcttgaggcctccccagccctgcagaactgtgagtcaattaagtttccctttaagttacccagtctttcccttataaattacccagtctcaggcatgtctttattagtactgtgagaacggactaatatatgtacatacagatacatatgtatatatatgtatatatatatatatatacatatatatattcttgtaatatgtgtatctcttgtactagataagattttatatgacagagtttatgtttattcatactcttattttacagagattgctatgatgctttgttataaacaattattttcacagtgggatattattctattatgtatccactggggagaatatagcatataaaaccagataagataatgttatgtacaatgtgtaagtttctttggctgtactcattgaactccagaatctcaatagcattaactagatttaatcaaaataactatttttattatataaagtttgattttatttctatattacaagcataagaaaacagaaaatgttactgataattataggataaatatgatagtggaaaataagcatgtagtaaaagcaatgctttggtctttttgacccaaaagtctatctttaattgtcaactgagatgaaaatgctccatatatgtggtttacatctgtttcacaattgagctcccaagtcttatctatcattgtatcagcaatgcctaagcacagtccagtgcagacacatttttaaaataaatattgttgaatgaagtatccagataccactaaataaaggaatgtaattcatatttctttgttaaatagcacaggaatactgtcagatgctttagaatttttagctttacccacccccagttctccatcagtctctgaaggtcaatagagcactaaaatcacattaattagaattgatcaagcaagaaaatattaactattataagtgtaataaagaataaaaatgagtagtctggaggtacctttatatatggtgatctgaaaacaatcttgatattgtcatggatcagaaaaacaaaaacaaatcaacaacaacaacagcaaaaactaccggtctagagactataaattagaaagagaaaggtagagaataatgtcaaaaatggaggcctgggccaaacacagaagaacttttgtgtcaagataaggattttggattttattttaaatgcattaaaaaaccagtaggtggttttaatttggttatttaagtacattctttatgtttattactgctatgtgaaaaaatacatttcagaagtgtcaaaaagtagaaatcagtgaggatatttttcaggctatttgggtaatcatggttaaaatggagggaaaaagaagcagacctatttaggatatacatgtagaaagacgtgcaagggaattttagtatattcaacagagaattggaagacagagaataaggctaatttgttgctctaaaattaaacactgagtaaaggttcatgtaattgatgttctgaggaatgtggaatgaataggttttactgataaataccatcatcttactgtgaggtttgcgttgtgtatctaacagtcatgtggagatgtcctgtaatgcataaaaatctggagttcagtgaagaagggtcagagatgtacatgttttagtcattggcatgtgggaatatcaggtgtgcaagtgattacatacaactgaggaatgagcccttgagaaatgggcatttaagaatttcaaagagaagaagccagtgaaaaggatctggaatgtttggacagtgatgcagaaggacagccaagagactgagatgatgtgggattcaagagaagaagataaataaacagggtttggtcaactgtgtctaagactgttgtcagatcaagaaataagagtacaacaaggtttctcagtggataacttaaacatgaattattctttctgtcacataattatatatgcaaacacaaattgtggcaaatagtatttccctaatgacatcaatactataaatatgaaaattgtattttaataataaatgccttaataaaacaaaacaaataatatattttatttagaaataatttaacctgcatttgattttcggagcctttatagtactctgaagtgcgtgaatttgggttgcaaaactacagcttttcttagtgctaagaaagaaacttgaatgattaaattgcaatataattttgtttagaagaaaaagacatagaagccatgatgacttcattttcttggcccctctttcatttgccattttactttcttctttctacttttattctgtatgcaaaacacatatatccggaccaactagcagaagtataacacaaaattatggaaaattcatacaatgatttaatttttctttctataagataatttttgcttgttccctgtacctgaaaaattcattctcatcccctctttctttcctactcctttattcacacgtttgactggtttacaatattggaaggaggatcattttgagagtaaagtgaaccaaatatggtaactgctttactcttctggttgtctttgaaaatactgaaataccaacatttactgattcaaaatctatctgtagctttgatcttttaaaagtcacccttgtaactggtcactgagtaaaggtaggatggaggatacttaatttcacactctcaaaggcttaactttctgccttttttctgcacattgttagtttgttgctgagtaggagatgacaggagatgtttgtttattttggaacgatagttttggcatagtaactattccttgtaaatgtaacagcaatataattccaggtcatgagcctcaaaagccacaaccagcaattgcattaacctagtttattgagtttgaatcattattcccaggcacatttcaaatttggccagctatgctaattaccattgccataatactcatgaaaataatattacagcaaagactcatacgtattatatttgaaaacatagtctcatttgctgtaataatagtagttatgtttctgtacacaaagtcatccaggaaaacattgtagaaaggattagggatgaaaagttaataaattactaagattcacacttagaaagcaaggcatttagactacataaatgtattttttcaatagctatgacaagatttcatgacagcaaaaattgtttttatataaatgacaaaaattaatgttaatgaggttgcctccttcaagtctcaacacctagaactgcttccctttcagcaaggtacaatgttgctagcaatacaggtccaagctctacacatagaacaaaatcaacagaaaacaagttgagggtgtatcctaggccttggtctcaagatctcttttttccatttctaaggtgctgaccagctatatctgtgagaggcacgtgatccagagcaactccatcttaaataagagctaggtaaaatgaggctgagacctactgggctgcattcccagattgttaagacattctaactcacaggatgagataagaggtcagcacaaaatataggtcatgaagactttgctgataaaacaggttgcagtaaagaagctggcccaaacccaccaaaaccaagatggtgaagagagtgacctctagttgtcctcactgctatacgccatgacagtttacaaatgccatgtcaacatctggaagttaccctatatggtctaacaaggggaggcatgaataattcagcccttgttagcatatcatcaagaaataccacaaaaatggacaaccagcagccctcagggctgctgtgtctatggagtagccattcttttatacctttattttcttagtaaacttgctttcactttactctatggactcgccccgaattctttcttgcatgaaatccaaaatccctctcttggggtctggatcaggacccctttcctgtaacatctttctggcaaccacaaaagggactatagtgagcaacccctgacccaaaggctaactttgggtaagtggtggggtcctgtaggaaacccccaacacaaaggctaactttgggtaagtggtgaggtcttgtaacaactttctgctgaaccacagaagggacgatactgaggagaaccctctgacccaaaggaaatggactgcaacactgattgaatgactttcggtaagtggtggagtacctgggtaaaggatgggattggcttagaggcccaacttaggggagttaaagtctctcctaagacagacagggttaaaggctcctctcaatggaaggcaaggatacttgccaaattttggttccagggcaaactttggaggctttgcatcccttctaagatttagggggttagaggcccctctcagtaaagtcactctccataaagtcccttttggttaagaacaggtttggcattacgggatgttaactgctcttctctttggaataatctgccttgcactcttggatgatggctgtgggtgacaggattaggcatgtacaggatcgtgggacatgagaaagtttttcttccctgaaaagagaaaacttgagagctgatgggagtgctggaaaagataccttcactaccaagaagtagctgcctgaacatttcagtgtccactgtcattggtgggtctttctctggcctctctgagtgccttgccttcctcaccctgcctctctgtctgtctccctgtgcaaactggttaaacggtaaaaatcactgtttatctactctgtaaagttttaatcagaaaaaaggatttgtgaggctaatcttgagctgtagccaatttgtgtgctttgtgtgtcctcctgtattgttccgtcataatgaggggtaccttaggacagaaaatgggcttaagacacctgtaagcctgcttttcaagacaggccagcaaattggtcagtcgtatacttgggagcttgaacttgtaaacgtggcagtgtcttctcttttcacgacggcgaccaaggctcagagttcagttccctgcttaggagataagtcctttatcttattctgtctgtgtattcatatgtgttgtgtgtgtgatataaaagtgctttgattaattggcttaaaaataagtgcttaaatcaaacattttgtcagaaagtaaaaagtgtaatgtctttgagttcatgttacttaagtaatctgtgggaaatagaattttaaagattattggtaaaataatatcttcaaaaatgtcaacaattggtctaaattgggtcagatattaagttcactaaatgctttatggtcataaactacttatttgacttttgaaaattgttcaatttacctactttggagcatgagattctaaataagtccaaggacttgtggagttagccacgccccatagctatgctagaggcagcccttatctgcacttctgcctggtgtgtctttgtcctagtgagagcttatacagagaaacttcaccttataaatccatcagatctcacgagacttattcactatcatgagaacagcacgggaaagacctgctcatgattcacttagctcccaccaggtccctaccgcaacatgagggaattcaagatgagatttgcttgaggacagagccaaaccatataattccacccatagcccctcccaaatatcatgtcctcacatttcaaaactaatcatgtcttcctaacagtcccccaaagtaataacccatttcagcattaactcaaaagtccacagttcaaagtcatatccaagacgaggcaaatcccttctgcctatgagcctgtaaaaccaaaagtgagttagttacctcatagatacattggggatacaggcattgggtaaacacaactattccaaatgggagaaattgtccaaaacaaaggggctacaggctccacgcaagtccaaaatcgagcagggcagtcaaatcttaaagctccagaatgatctcctttcaattcatgactcacatacaggtcatgctgatgcaggaggtgggctcccatggtcttgggcagctctgccccaggggctttgcagggtacagccttcctcccagctgcttttatgggctggtgatgagtgtctgtggcctttccaggagcacagtgaaagccactggtggatctgccattctgagctctggaggatgatggccctcttctcacagctccactaggtggtgccccactctgtgtgggctctgaccccacatttcccttccacactgccctagcagaggttcttcaggagggcactgcccctgcagcaaacttctgcctgggcattcaggcatttccatatattctttgaaatctaggtggaggtttctaaaccccaattcttgacttctgtgcactcacaggctgaacaccaagacttgaggcttgcactcagtctgagctctattttggcctttttcagccatggctggaatggctgagattcagggcaccatgttcctaggctgaacatagcaatgggaccctgggcgcggcccacaaaaccatcttttcctcctaggcctctgggcttgtgatgggaagggctgccatgaagacctctgacatgccctggagacattttcgccattcattttcttggaaattaacatttgtctccttgttacttatgcaaatttctgcaacaggtttgggtttctcctcagaaaatgggattttctattgcattgtcagtctgcaaatttttcacttctatgccctctttcccttttgaaactgaatgtctttaacagcacccaagacacctctttaatggtttgctggtcagaaatttcttcaccagataccctaagccatctttctcaagtccaaagttccacaaatctttagagcaggggcaaaatcctgccaatctttttgctaaaacataacaagagtcatctttgctccagttcccaacaagttcctcatctccgtctgagaccttctcagcttagatgttattgtccatatcactatcagcattttggtcaaacccattcaacaggtctctagggtgttccaaactttcccacattttcctgtcttctgaacccttcaaattgttccaacttctgcatgttacctagttccaaagttgcttccacatttttgggtatcttttcagcagcaccccactcctggtaccaatttaccatattagtctgttttcatgctgcttataaagacatacctgagacttggtaatttatacaggaaaaaggtttattggacttacagttccacatggctggggaagtctcacaatcatggtgaaaggcaaggaggaggaagacatgtcctacattgatagcagcaggcaaagagagagcttttccagggaaactctgccttataaagccatcagatcttgtgagacttatttgctatcatgagaacagcatgggaaagacctggccccatgtttcaattacctcccaccaggtccctcccacaacatgtgggaaatcaagatgagactttgatgggaacacagccaaaccatatcacgtggcaatgtcagaaagttactctacatggtctaaaaaggggagttattaatccagcccttgtttagcatatcatcaagaaaataaccataaaaatgggcaaccagcagttcttggggcttctctgcctatggagtagccattcttttattcctttactttcctaataaacttgctttcactttatggactctacctgaatcagctttgaataaaaatcagtgtgttgtttagaacagaatggattattttattagagagacctctctgaaagaactcttctttttcctatagtctcttaatatacaaaaacaacattctcaagagttttctgagttattttatacttacttgccacaaagattaagattattctgtttatgtgaatcttttgaaactctcttcttttgatgagttttttctggctgctttaactaattaccataaatttagtgtctaaaaaatacaaatggattatctcacagttctgtagtgtctccatgggcttaaatcaaggtcttgggaagacttattacattttgtagaatttaatggggcgtgcattatcttgtattttacagtttctagaggtctcacacattgtttggctcatgaccccattattttatcttcaaagtctgcaacactgcatttctgtgaccattcttgtgcagtcacaactcctctgactttcacttccacttttcaggacttctgagtttacattgcacccagttaaataagaaaggatgatctctctatttaaggtcaactggttaacaaccttaattttatctgcaaccttaattgatcttcaccatgtaagctgacatattcatgaatttggggattaggacttgcactccttgcaaattgatgaaatccttatttgcatttgtagttaagaacagctttcaaggtaattagaatatgcagtcaggctattttttttttcctggcaaatcctagcagggaaagaaagaaaagggaggagataaagggaaaacagtggatgattcttacacaatgtcacaattcatggaaaattgaaaagcctgtctttgaataagtcattgaccttaactattcattatttttctcccatctctttttgatataattaaatataatttcttttcctgtatttgatggttttaactttattaatattgattttcatgtgcatggtaaggcaaatttcaccaaatttatttatgttgaattatccaatacttctttcaatgctgtatttcttatttgattgtgacttccttgaaataatggctataacttatccatctccatgttcgtcagagctgacacattaatgattatgttgcacattacagacgttccttgaatagttgagtggagggatgtatgaatgattgccgatcaataagttattgccatgtcattttgtctactaacaagcctttaaagctttggtcaatatttaacactagttacaattgcatttttctttttattttacaagcaacatttcaaattgcatttattttagaataacttagaaaatgttaagccagccatatttattttgtattccaagtttataatctaaatggaaaagaagaaactaaaaaaatattgcttactttgaggacagttgccatatgaatttttataacatttgttttattttaccttactgggtaatcatcttttgtttccaatcatttagtatataattttaatatcaaaagaccacagtcacatgtaggaatggagagagtaatagctgctaaattctaatgtaaaaccaagatgcttatggggtcaggcagtgacattatttatcataacatatccaattgaataggaagactctgctgagaccattccaccatgtcaattacatagtcaaaaggggacatctcaggctggagaataattaagcctggatgagttaggcattggatttcaacaaaggctcattatcaacccaatagctgttctttgaaaaagggtatgtctctcaattagtcagacctcaagtttagaactccaaaagagggtatctatagctgcttccatttttcttggttaggagcaaaagagatagaatttgaattgcaagactgccagaccttagagactagaggcatttgtattgaatccaaactacctgctggttgtaaagggcagaggagtgtgtctcacttgtgtaattacaactttcccctattgctttattgggatagtctactctggagcttatgagatagaaaataacaagcaaataacataacacatcaattcctaaaatacactcaaagacagaagcaatgaaacactacaataaaacatttaattatttttttctccacaacaaattttgctcaaagccattattttattgttttagagataaactcacagctgccacaagatcctgagatcctgttatttcctggctagaaaatttgtaatgcaaaggtggaactgaagtgccaaaagctctctaagagatcacttaagcaacaggagagtgagcatgtttgtacactctcttgggcacacatgttctctctctctcctttttgactacttgacaacagagtttttatcactgtgcatgtggagtaaacacggcccaagggatcatttactgtgtcccctcagatcctaccttggttccatcctaaatttcttggtgcctttagccacctctgtacccactatccataaaagaatgggcattcacgtgccagtatccaaaagagccataacaattaaaatccttctctgcttgaaatttccaaatatggggtataacatccacagtgagaccttggactcacccctaatttttaaagtagtaaagtcctttgtagaagggcacaagagatcaggtgaacatggaaaagcttatatctgtgtcagtgaatgagacacagttcctttcaggttcaagaatagcagctgagcttccccaaaccatgttccagctatagaaattaaataatctttcacttctctttggaggagaaagtgaaaaacagcagcaacaattaagctccttgtattaatcctacttcctacgtaacaaacatcttcttaattcctcattaaagaaaaaggaggagaaccacatattactaattggctaaatgatttagtcagtatgcttgctaccaatatctactagctaatgggcccttgctttttttttttccagctaatcatgtttatgacaagattccaccttctttacctaaattgatattttttatatttatatttattttttaaaatctgacagtaaaaacaaagtttatgaatcagaggttaaaaatatcatttgcttatagaatatcttaacacaggttctgcttgtttcatttctacagaagtaacctgcacatatagaagaggcatctgcagtacaggattggagctccacccttacaaaatctccaaacttacatagggcaatttgtacatattttttcttcccttcttgagaaagaagagaaagctttttctctaatgtaaacaaatcccctctgggaagtgtacaaaaaggtccctaagttgcttcaactctttaaaatgtaaatgaatgggttagaaattgattacctgttgttatgtaaatgaatggctctagagatgatgaatttgtaaatttccctagggtttttatctttaatttccaggacttgtttgcctcttcctcattttcttttaagttggattgccagtacattttgcccagaaagtcatgaccgtgcaaaaatgtaaaaatagtcacattttgttctaacacaaattgatctctataccgatggtgttatatttatggcaaataatgattttctcagtacataattattaaacatgtagtaatgctaatgtggaggataaggcagtaaacaaggggggaaatatctttgccctctagacatgggaaaacaaataagcaaaacaaatggtaacttaataataaaagccaagggaacaaataatcagagaaacagattgaaatcatggggactttgggattttcaagcggatgttcagagaagttcacattaatgagaagacagtatctgaatgaagaatctaaaaatgagggtgtgaaccttgacagtgacagagagaatttgattagggagcaggaccagtgaaagcaaaagccttaagccggagtcatgtttggctattcaagaaacaacaaggataatagcatagcgaggacagagaaagtggaagagagactggctatgatagataatattcacagtcaggtcactaaattaatttaatatataattgaatgctaatatattgcatatgttacacagtaaaattaggaaaggtgtcatggaaggattggaaattggattccttctataaagaaaaatatattttatatatacagagtagggattgcaaaggaatttaggcaaagtgtttgtggctaaaacccctatgatattaccaaattttaccccttttatcttcagcagagataattagcagagataattaacatgactgcccaactaaaatacatgtctccccctcttttataattaggtgtggacatagctaaattatcacaaaaggcaaatatgtggaattaagtaagcttgagaaaaatggaatggcttgttcctcaatattgtccaccacgctgaatctaaaacacaaaactgcaagttcttctgctttctcttttctgcccttcctccttttcacctttcttttttaatcatctcccccttcctttctcttttctttcttcctttacgccttcctcattttcttccacaaatgattcatccacttctacatgtcaggcactgtacagggtgtctgagattcagctgtaagtcaaaccagaatctgtcttaccccagtggatctcgtactcacatatatgaagagatgatgataaaaaaagttgccctgttgatttggggaggtcgaggccaggcccccacttggcttgaagggacattttcagacttttctttctgtcacttggagtgtctatgcctctcatgtttccctaataaactcctcaactttttttaaaaaaagtttcagatatgaatgttacattccaacttgtataactggtaatgaagaagtgtcataaattaaaataataataagtgaaatatggcagtataatatagtgctcaaaaaagttccatcattttctgaaatttcaaagccatataacattaggtaagttacacaaactttgaaagttttagtttctgttttaaaagaatataaagggaatgcttcatgtagtgagcaattgtgtttataaaaaattttagccagtgtaaggatgctaacgatgatgcatgtgaagtttatgtaaaatgctctgaaacaacattctctgaagcatagtgagagcttaatgaatttgagctatggatattgtgaattactaactatttgaccttggcagaatcatgatagaggatgtcctgaggatgcagtgatgtgccgagaatttgagagtaagagtttaaagcaatgttatattcacaaagaaataataaaatatacaaggccagatgtctagagatcacagactttttaaaataattcatgcttttaaattcatactttgtttttaacaaattcaaatgccttcacaggaggggtaacaaccataactgtgtgaaaaactgagccatcacctaagtaataataatttttaaaaattaataagaatcataaataatcaaaagcctggagtcaacttccacatcccaatttaaacgtgaagctataatgagacttcaaaaattcatggaaaaattgaattaaaatataaaaataaaaaatacaaactttatttctcaacagacactccattaagttcaaaacacttttataagtgactccaaacatttagtccctccataaaggaatgagagtccttggaatttaaccatgtcaatgcagtctgtttttatattattacataaataaatggctgttctttacataattttaaaagttaggaaacccagaaattgccagaaggcaccaaatcaggactggaaagtggatggctaataatttctcattgaaattctcacaatattgtttttgttttaggagaagaatgagcaggaacattgtcatggtagtgaagctttgttgagtgtttctctgctaacgctttagctaactttctcaaaacactcttataataagcagatgttattatccttggccctccagaaactcagaaagtaaaatgccttgagcattctaaaaacctgttgcaatgacctttgctcttgaccagtctgtttttgctttgactggaccacttctacctcttggtagccattgttttgattgtactttgtctttaggattgtactggtgaagctttgtttcatctcttgttatatgtttaaaataattgcttcaagatcttgatcccatttggtttaaaatttccactgaaagctcttctctggtctgccgctgatctcggtgcaattattttggcacctatcaagtagaaaatgttctcaacttcaatttttcagtcagaattatggaagctgaacaagttgagatatgtatgttgttggctattgtttctgttattggtcttctgtctgcttcaattagggcagaaacaggattaatttttttccttgcaaattggtgtggatgttctgccactgcaagcttcatcttcaacattatctcatcccttcttaaagttagctatctgttgtaaactgctgatttattgggggcattgtttctataaagttttctctttttttcttccacagaatagaaaatatgggaaaatttcccactcactttatgagacttttataactttggaattaactttatggggacattacaattcaggagaattacaagccaattttattaatgaatgcaagtaaaatcctacataaaatatgaagacatcaaatgtaccaatttatgaaagggaaactgtgatggacattacccataaactttttataaggtattaatcatgtgatcattcttccacttaatgattaccataaatttgatgtttgttctttcttcaattttcacagatttcatgttgctctgatagggcttttgtcaaaccagtgtcctctccttggtgcctcaaactagatcatatttagacaagttaggaaaagttgcaacaggctgggtgtggtggctcatgcctgtaatcccagcactttgggaggccgaggcgggcagatggtcagagctcaggagtttgagaccagcttgggcaacacgctgaaactccgtctctactaaaatacaaaaaattagctgggcgtggtggcaggcgcctgtaatcctagctacttgggaggctgaggcaggacaattccttgaacctgggaggcggaggttgcagtgagccgagatcaccccactgcactccattcagggcgacagagtgagactccacgccgtctcaaaaaaaaaaaaaaaaaaaaaaaaaaaaaagaaaagagaagaaaagttgcaacaagttaatataagtttattttggtacaaaaaatgtttaaaattgatacataagttttatgataacaattttttatgaacatcttgaagacccttagtttgagaagaaaaaaagaagtactacatggaaacattcactcagttcaaaaataatgactattaagcaacggttctatgagaaaggtactattaatttgtaatgagaaagagcctatggatcatcttatatttttaaaattgaggggacaacaagaatgtttactatagggctattatagcacattcgtgaaaaagggagtcagaatttaaaagaacaacattggcaaagattacttattacacttcatgtttgtgaccaagatttatcaatagaaaagtactcttattttacctaaaacttttaatccttaaagatctttactatgttatattgcaattttcataaagatggccaagtaaaaaaattatagggaaacaatgtactctggtttcaactaaagtcagaaatactatacttcagtaaagcacactttaattaaaatttaaagaattatttaacactcccaatatttgatcgattaaagttggcaaaagtcagaaagtatttggcatgtaaaatttccctttaatggttagatgtaatgaggcatttttttaagtgttttagaataacccctgggaataccatcactagaaatactaactggaatatttagtgagtaaagcaaatgccacattcttgggtacctacaaaaaaaatctcactttcagagaggcacaaattatgcatcttattaatgtgcagaactagatctacaaatgggcaatcagaaaaaactgaaaactctcaaaaagctaagttcttaggagaaatgtgtatatttgggacaatagtaaataaccccttaaaagaagtaaatccagtcctcaaagcaaaagggcgagtctgagagcaagagccccagagaaagacgccggaaggaagtcgtagatgtaggaagtgactgtaggtttagatgaatggaaaatgaacttgccagttcacagctatgtccttcccaatttaggaggttaagggcaggaaaaacatgagaaactcttttgagaagctgcacaagctgacatggaggatcaaggatttcaaaagctttgaatataaagaggtgagaatttttattttatttttttactattattctggtctgttggttgagctctgaggttaacatcttacaacactttaaagtgaaactaaaacaaacacatcatttttaaaattggccatatccggagcccagaaaaatattacaaatagtaacgtgtcctttcggacacctcataaaaatttagggaagagatatatggaaataccttttaaacacttggcaaatagaataggtttcaattacatcagattatagtttttagtctgacagtttgtgtctggatgtacaacggattaattttattaagtttgttggaagagttattgaaacaacaggtttcaattattttgttctcactgaaatctgtttcacaaaatggaccactgaaataagaaaaatggtttcagtttattttaatgtgatttcctgagtggagagaattttctacatatatatgtaaaagtcaagttattgcttatgaatacagcattactttttaactattctattaaaataatattctcttagatttcaataacatgtaatgtgcacgtattacacacatgaaaagtcaattctcatggtcactcacactaaggtgagtgaatatatgactgtcctctgcatgtgatgctcaggatatctcatgaaaatgtacaaattgtcataaatggaatttcctagcactgctatcttaccataaaaatgatgtggtgataatagtggtaaacaaaattgtcagagatcaaatgtgacatatcactattcatttaaggtataaaatggctgttgataagatatttggaaatggatatagcatgatcataatacagaaattacaaatattgctacaaattacaatttttagaatttgttttaagatatttcattatcactaaacaggcttcaaatgcctagtgaactgataaatcccactgccaactgatttgtttcaatatgatgtgttcattgcttgtatttggacctattaataacttgcagagctaagaagtatgtgctttccttgcatctttattgtactccaactctattccctggaagatagccaatgtaaaacaatattaatttaataccaacttaaattttgcttcatacaattttcagtttatatgagaaggtaatttctttatggattctgagttaaaatgaaattttaagatttcaaagtttattattgttatttcaaaaattgcggttaaaattttatcataaaaatcatacttaagaatcataatcttctaatattaaaagaaggaatacaagggaacaggtgattgagctgaccatagaatatcgtatgagtggaaagtaaaagctcttggcagtgtagagatagaacttgttaaagcagttgcagttccgtatgttgtcttcttaaatagatatgagattggaattaacttgttagtgatattcatttctaagaatatcatagaacgccaaaattggaagattaatttggttgtgatcccaagttcattgaatagtattttatcttactgtgtgtataagtaatatgataatggtgatggtcaaaatagaaaccttgcttgatgccatgcatggtactaataagcattagtatgctcataaagcatgagcattatgttatgtaattctaacaatcttatgatgtagttataactattacctcatgcttttatttattaatttaaatgatatttattaagtacatttggtcttcaattttatagatggcatagctatcataaattaaacaaataagctccttggagttatagagtttattcaggtttaaaagtgagcaaaaacacacaaaaaatagtaaatgaggaaatggagaaaatagagttatggtgagattgggtaagtcaacagatgtaatagggagacattttttctaaagcactgatatttgaactgatttctgaacttttgaatcagtcatctgcacaaaatgcttgtggggataatttcaggcaattggaacagactgcagctatcatgttgtgaaaaataagtgtatatttttgacaaatcaaagatacaggggatagtaagagaaatctaatgtctggattaccagaagaaaaatacagaatgtagaaaaatttatagttaatgaacagatagaggttaagaatgtttctatactaatgaaataaatgaaaacaataaaaatataagaaatccacaaaactctaagcagcatgaaacatgtaaatctaccactgctatttctgcagaaagcaaaggcaaataggagatatttttaaagccagaaacaaaaagataaataattctaatgctgcaaatgctgtatactgaatgcagtctgccatgtactaaaaaaatattactacctataataatacccttttgtaattaaggtaatatgtatacatttgaaagccaaaagagagaggaaagagaagagagagaggataagaaggagaaggagagagagaaaatttgtaaccagcataattatactgaaggaaatactagaatgtattgttcatgcaggtgaaaagttaaagataaatattctatgttcaaataaattttgactatataaaaccaaaagagcaatattatttaaaatttataatatagacttaattaaggcacagcaaaatgataggatattcttgtggagggggaaataaaagggcagttcattgtttagagaagaataaaaagtagtcagcaatgtaagactcttataagtctgagatactttgatgtgaagttccttatggaacaattactattaaatggtaataaaatattgtgtataacatcgaaacagaatagaagcagaaaaaacaaaaaagatacagaataaggaaaacaaagagagaaaaaatatatcattagaggaacaaatagaaagcacttattatatttatgtataattatgttatatacatatatacacacatctatatgtatatatatacacatacatatatatatatatataaaattacattaattggccaatgaaaaatacttccaaaatggaaaaaaaaaaccctaagttatttagaagagaaacactgaatcataaccacagcaaatttacaaataaaaacaatgaaaaagaatattccaatcaaacattaacctatattaatgccagatgaactaattttaagacaaaaatacattgctagagatgaatggaatgtttaatattgataataaaatgaattcctaaaaggttgtaagaaatatataagaacttaatgatactattttaaaatgcagactcactaatttacagaaaaccaaggggaaatagacaaaccgacaatttcagcaaaatatttcttagtaattaataaaataataaaatagtaaaatatttcaaaatgttaattgataaatcagtaataaaagataactagattgtccttacaaacttggaaatcaacaaataaaagactaaacaatccattacctgtaaattcataatagaattaaaaaatatctctaactgaattataccaaagtaatacaggtgatgacttgaagaatgcacaaaagcagtataaagacaaaaatacatagcagtaatgaccagtaataggtatgcaacataaatgagaaaattaatctatcccatctatctcagaaagttaggattgaaaaaattgacctatagaatgcagaaagaagggaatgataatgatgaaatcaaagtaaagaaaaaggaaaaaacaaagcacacaatggagagaatgaacaaaataaaaaatagttatttggaaaggttttaaaatatataataatctggtgtggttaaacataaccacatttttacctctcccttttttttttccttcagaaagaacacatctaaggtttttctttaatgggattaaattagtgacaagattctctttctccctccctctgtctctttctatctctccaatatctacgttttctaaccctgtcttttccaatctcactaatacctaagttttctaaatggaactagcactgttttgtgtctgaaaccttctcattttaaaaatgcactggtgatgtatcctatctgagccactaatgcctggtagccagataggagaatgaaaaaaggttatgaattgattggtggagagtgagtatggaagaaggagacagatgggaatgctagttaataaacatgaattctggaaacaatgacaaatggagaatgctttgtcctgactttgtttcatgtaagggttaggcctggtttttcctttggtacttgctgagcaaccgcaattcataattatttctcctccttacagagaaaggtttaaattagatttttcatgaagtgatttctaggcctaaagctccatgaaataagctaaacccatttttaagtgtgtacagcatgtgcatgttgaatgtcctcaaattactagttatattactatggtcaattatacttggcaattgtgcttaattgaaggtgaaaacacattaggtttttaatttaaaagccataggtaaaaccactctaaacgtcctatttggatctcagacctggtgatgcttttctctatagactggaattttacagtacattaacctgttcattcacataattagaacaataaccgaatgagctgttgtatcaggtaatacatgatagcaattccattcatctctactgaaatttagattatgaacatgaaaccacatttgaagaaactcagagaaaaatatatgcataaaacatatgtggtggctcatgcctgtaatcccagaacatcaagaggccagaatggtaggattgcttgaggccaagagttcgagatcagcctgagcaatatagtgagatactgtccctaccaaaaataaataaataaataaatacataaacaataaaattagctgggcatggtggtgcacctgttatccttgctactcaagaagctgaggtgagaggcttgcttaagcccaggagttccaggttactgtgagctattatgtcactgcactatagcttggatgacagagcaaggccccatctacaaaaataaaacttaaaaaaatgcatagggcatattttttcctcttgaacactttcaatcagattatggtgatacaaatcatcaaaacatcaatgacaggaactgttagtttctgcagactgccctttcctcatttccttcaacactccatacttctacaagttgccacatgctgtttctgaaatagttctcacatctgtctccttctctccagcactgctggctcactatggtcagtttctacctccagtgtcaagaccctcacattcatctttcacactgttaataaaatcatcttcaccaggtcataccctcgttcaaaggacctctagtaaccttccgattttaggctaactccacatgcttagtgccatctcccagccttgatccctttgttttctgtcctcagatgtatttcttaccatctgagaaaccagatgtgtgctcttttttttttttaacttattttaggtttgggggtacatgtgaatgtttgttacataggtaaacatgtgtcacaggggtttgctgtacatattatttcatcacccaggtagtaagcccagtacccaataggtatcttttctgttcctctccctactcccaccctccactctcaaatagaccccagtttctgtcgtttccttctctgtgttcttcagttcttatcatttagctccaacttaaacgtgggaacatgtggtatttggttttatgttcctgtgttagtttgctaaggatagtagcctccagctccatccatgttccctcaaaagtcatgatctcacttttttatggctgcataatattccaaccataatagtgttaatattgctgaggtcatggccattatcaaccctagttctgcatatcaaggagaatacatggaaaggcaaagatgttgcactagcatatttaattttatacctgatgagactgttggatccaggagaaactcatattaatacttgataggggctgggtgtggtggctaatgcctgtaatctcagcacttttggagcccaagggggtcagatcacctgagttcaggagtttgagaccagcctggcccacatagtgaaaccccatctctactaaaaatacaaaaattagccaagcgtggtggtgcacacctgtaatcccagctattagagaggctgaggcaggagaattgcttgaacctgggagttggaggttgcagtgagctgagattgtaccactgtactccagcctggctgacagagcaagactccatctcaaaaaacaaacaaacaaacagaaatacttgatatggtttgactgtgtccccacccaaatctcatcttgtattttagctcccataattcccacatgttgtgggagggacctggtgggaaataattgaatcatgggggcagtttccctgaaactgttctcatggtagtgagtaagtctcatgagatctgatggttttataaggagtttcccctttcacttggctctcattctgtcttggctgccaccatgtaagatgtgcctttgccttctgccatgattgtgaggcctcctcagccacgtggaactgtgagtccattaaacctctttctctttataaattacccagtctcatgtgtgcctgtatgagcagcatgaaaatggactaatataatacttaatatcaacactgaaaaaaacaatgatacctgcttcttgttatcccatatatatttccatcatctgagaataagtcaaaattactgtaagtcaaaactttctttgcatactcttttcatcaaatgcattcactgagccccttaggagggatgaagtacctcccaacatctcagaagcagaataacgaaacgttttgcttatatgattttctctacatccatcccacacacatacacaagagaacaataacatctcagtggtttaacactatatgtttaacttctaggtcgtggcacacttcaatgaagattgtctatttcacatgagtggcaatccttgaagtaacaacctgtttttacagtctccttacctctttgatgccactgtttccagcatgtgacccccatggtcaccacacaaagggcagaaagaatataaaatatctttgaagcccagtggaaacttcagactgaatctgggtattgtattaggttggtgcaaaagtaattgtgattttcgctattactttgcattgcaaaaaccgtaattacctttccaccaatctgatattataaaggcttggtattcatattatatgcaaatttacaatataaaatctaagaaaaaatcctctatcagtttgtaagtttcctctttctcttataacaggttgccacaaatgtaataactttaaagaacacagatttattatttctcagttctgtaggccaaacatccaagctggctcagctggtttctttgttttcagtttcacaagggcaaaatcaagctgttggctggcttggctctttgtcaggagactcttggaagaactggctcttatgcccattcaagttgttgctcaaatccggtgcccagtggttgtaaaactgcagtccctgtttccttaatggccagcagtcaatctagcctacagaggcctcctacctcctcacacttcaagactctctcaccttcctttcttcctcttgtgttctgacttcatcttctgacatatctctcagcccctaaccaaagaaaaattatctgtctttatggcttctgtgattatgttgaacacatctgaataattaagagtaatgtcgttattttaaggggagctgattcactttagttacatctgcaaagtcccctgacagcagtactgagatttgtgtttggattaattccctgaaaatgggaatctttagaactctgcttaccataatcagtaacactaacttgaactacaaccacacaatttatttatttatagtcaccctaatctttcataacaaaaacgtacaaataattctatggttaggcacaatggttcatgcctgtaactccagcactttgggaggccgatgctggaggattgcttgagcctagaagttcgtgatcagcctggacaacaatacgagacctcaccccttaaaaaaaatgaaaaaatacacacagatgttttaaaacaaatacagaagcttaaagtcattcatgtaaatacatagatttaagaagtaaatttaaactttaaagtgatagtccttattgagatatatattattatgaaacttgcggatgagtaaataatcataatatatgagcgattagcaggaggcaaaaaaaatcctctgtagtaatatataacagaatttgggatataatggaaagtcccctttaatacttatactttaaagtatcagcatctaaaagttaaattgacagacaaagatgagacagaaaggaagataccagtaaaaatacccaagaatggatcattgagaatccaagcagaaaggatgttacagtaaatagcacgcttgaaaaataaaaagttgagttaactgttgtattgttactacacttttcccttgggtaagggtagtattattaaggtatttatttacataccctatgatgatattttaagaacaaagttaaagtccataatagagaggactttatttacaagactcacttttgcaattggttaaattctttcatatataatgttaagaggtaaaagaagaaaacggtccaaataattgaaataaaacaatttgtatgcatccactagcaaaaaaggcaaaacaaagcaacaacaacaacaataaaaaactgtttaaagtttcagtcagctataattatgttttacactcgtcaaattaatggggtaattgttccacctatatatttaaaagtgtacatttgcagataatgatttattgacttcttggatatatgtaattatgagtagttaatgctgggattgagtgaggtgtccaagaggcttattaggggttaatacctgtgaaagataaaaatgaggacaaattggagttggagaaagaaattcttcgactgcaatgcgtatatgatacatgtaagaaaaggaagaaaagcagaaaacagactctgtccccctccccatccccccccaaaaaaaagaacgtgttcttagtggaaatgccattaaccaatgcctcagcatagcaagattgacagaattaaaatatttttgtcaaaagtggaattcctttaatgggtattttcttctcttaacctctttggagacctggcaaaacctctcagagctgccctgctcttcttactccaatctttcttccttttctctctcccttcacaggtgtcagacttacatcagagcctgagacttgacatgcctatttttgcactcgctcatttttcaaatttcataggcattgctccctccaaatcaccgctcttctaattttatcctggagtgtgcatcccagaagacataagctgacacaattgggaactgaagttgcttgaaaaagctggtggtaagattaggtaaaataattgtgttaccaccttctgaatggcaatcaatattgcatcctaagtagcatgtttggttgggtgcagatagtttttgaaactaggtggtgacccaacttacaaatatgtcaccagtggtgacctaggaaaacagactgatataagggaaagctcttctcagtgagatgatttagacatttgaaagggcaagggcaatgaatggggtatgcatgttaggataatgaaattaacttctaaagcctaaggtgtattgagataccacaaagaaatgataaaaaaaaaaaaaactggtgccattgcacaaataatatttaacagtgaaagttggcctcttatacagcttataaggagtgtaagaaaggatacagctgagatgcaagtacaagtcttagtagagtcacagagctccaaatatgttgaaatgattagctaaattagatctgtcatgctgtaaacaggtcctaattgagaaaatctgaaactctaaaatatggcatgctatatctatgccagcttgcaacagtgactcacccttttaaaaaaaattgttggctgggcgtggtggctcatgtctgaaatcccagcactttgggaggctaaggcgggtggatcacttgaggtcaggagttcgagaccagcctggccaacatggtgaaaccttgtctctattaacatttcaaaaattagccaggtgtgttggcgggtgcctgtaatcccagctactcaggaagctgaggcaggagaatcacttgaacctgaaaggcagaggttgcagtgagccgagattgtgccaatgcactccagcctgagtgacagagcaagactttgtctcaaaaaaaattgtttatatttaatatgtgcaacatgtttttggcccacccttcttaagtaagagtttacgtttctaccatgttgcattagtctgttttcacactgctataaagatactacctaagactgggtaatttataatcaaaagaggtttatttttctcaaagttctgcaaggggaggcctcaggaaacttacaatcatggtggaaggcaaaggggaggcagacaccatcttcatacagtatcaggagagagacagagatagagaactcaggggaaactgccatttttaaaccatcagaccttgtgagaactccctcactatcacgagaagagcatggggaaacctcccccatgatccaatcacctcccacgaggttcttctgtagacacgtggggattacaattccaaatgaaatttgggtgcggacacagagccaaaccatatcacatgtgaaaagaccctttacaattcacttcctcataaggcaatagatgtttcctataggaatgtggcctaccttgtgtcctagatgttaaccaataattaccattaatttccagtataagccatctggcaatatgctgggcctcaaagagaaatatgactaaagtatattttgagacttcttcatcaagggacctagaatgtaaaatggataagtaataaatcactaactagaggccctttatgaaacacaagatttaacatttggtttagaaccttagggtgtagggcaaattcactccacagttaagtagaagcctagaaaatgtaatcgtctatgctacatgaagtttaaatatatgtttctatgccagatggtagaggaaggaatttttaaaaagctcagaaaagtagctgtgataaaatgaggttgtgtgaggccatgaaacttaccagatgattgtcatatatgagaggtcccagaagacccactattcactaagatcatcagaaatatgctgttaattagggcaccaacatcataaaagattagctatcttttgcagatcaggactgatggtagaagaggtagtcacagggtttagtttgttaatagtgatggagaatatgacatcctggatcaacagagaccagatggtggcacataaccacagaattcataagaattggcaaagtcagaaagtcagacactgggagttgtagtgacagtggaagctgtcttctttagaagtaaaaaataaggttctatttaatatctacactcagaagagggtaagagggtgatgagagtcatcccaataaaaatcgtggttctttgctctattcctggaccagttacaatttggatacccaaagtctcattgtggatccccttttacagtctggaattacagggaccatataataaatgaggtccagtaggtgcgctgctgggattgatgttcttagcagttggagtaaccaatagtaagagctatagcagcaggaaggactgggaatatattagcatcttaatggggatgacagggcctgtaagtacaagtactggaacttcaaggacaaggagtactgtgttagaggaatatggaggcagcatatataacaaagtggacaacagattgtccatatgctgacagtatttggtttgtttgtttgtttgttttgagactgagtcccactctgtcagccagactggagtgcagtggctcactgcaacctccgcctcccaggttcaagcgattctcctgcctcagtctctgactgtatttgtttttggacaccccaggacacaccaatataaacggagtcataacagtggcagagatggggttaagcatggttccaagtacagagacttttatactttccaagaccaatttatttactaatgtttacaatccttgcatatttaacagggatcagcatcatatatcactatttctcaaagattatctggtctcttgatggcaaatctacaatattgaaacctttgaaagagaaattgtgttttgtgagttacatgactaccgtttgcatccaaggtctcctctgtagtcaagagaagaatgcagaaactacatgtccaagaatctctttccaggttagagtttaccagtgggattaaatcatgtgaatattggaaggaagagaaaaacaaattccgatattctcaggcaagcattgtgaccagaggtagaaactcatggcagccagatgaggtggctgcatagacttctttgcaaactctcatttcatggttgtattgtcaagagttctgcatctcaaacctttttacagaggatacacagctcaattaaaaattttaagggatagtatactgaacacattttccaataaaacttattttattttagcttgaatttctccacatataaaatttatagaaaatggatatattctattgatgattataatttaacctttagatgaattatttgttaacatcttgcatcttgatacaaacattattcttcatataatcactttatttttgtgtttaactgaggccctgttgttacagactctagacagcttatacgtatttggacaaggcaacgtgatgaagaaataatataattgtaggatcacctctgtccagtagctgttatccaacatctgcatacttagatttctggagaggtaggtaaactactgtattagaaaacactagaagtgcatgattgtatttttcatgtccaaagtctaacacattaaaagagaaaaggattcgaaaattatctactttgaaagttttaaacaaaagtgaattttcttggttaaatatcctatttaattgcctttctaaaaatagcctaaatgtccattgtttgatatatgtggtgagatattttttaaagtacttaattataatgttttatttgatgagactagctatttggtatttttttaaatggaaagggggcaaacatacttaataaaatgcaaaaatagtactggaaaaatattttaaatgattgctaagtattttagtgaatacctaattgcattaatttgctgagactgccataacaaaataagacacattaaatggcttgaacaacataaattattttcacacaattctggaggccagaagtttaagaacatggtgtctgcaggtttgactcctcctgaggcttttccactctgcttgcagttgtgtgctttctcactgtatcctcacactgtctccctctgtctgtgtgttctacaatctaatctcctcttcttacaaggataccagtcatattaaattaaatctgcaccctaacgacctaatttaatttaattagctccttaaatattttatctccaaatacagttacattctgaagtactacagattaggacttcaacatattaattctggggggagggacacaattcaactcatagcacttgtgttgttcatctcatagaaatataactttctatgggtctttcacaacaatgaatgttagatgaatgctatggtttgaatgtgttccttccaaaattcaggtgttgccaatgtgatgatttgctttgttttgttttgttcctttgagacagagtctttctctgtcacccaggttggagtgcagtggcaccatctcggttcactgcaacctccacctttgaggttcaagcaattctcctgcctcagcctcctgagtagctgggactacatgcgcgtgccaccaaacccagctaatttttgtagtttttagtagagttggggttcaccatattggacagactggtcttcaactcatgacctcaagtaatctgcctgacttcgcttcccaaagtgttgggattacagacataagccaccatgcctggtccaatacaatgatattaagaggttgatgcttgtatacatgtgtaactagcctgcacattgtggacatgtaccctaaaacttaaagtataataataataaaataaataaataaataaataaataaaaataaaataaataaaaaataaagaggtgatgctttaaagaggtgattaggtcatgaggacttcttccctcattagttggactaaggtccttatacaagaggcttcacacaccatttggttctagctgtgcttctgcctcccaccatgtgaggacacagcatttccccctctggaggatttagcaacaagcaaccatcttggaagcagagagcaaccatttcctagacaaccaaacctgctagagcctggatcctgaacttctcagccttcaaaattatgagaaatacttttctgattattattagctacccagtttcaagtattttgttatagaagcacaaaatggaccaagatgatgaatttctgagactgctgacaccatcataggagcaacatgtttattgtgtaatctcttgagacttatctcaagttagaaagaaggaggaatagattctactgcccacagacaaagattctttgaactttggattttgatggatctaagcacaatatttaattgtgagtacatgttattaaactgaagaacaaaagaaagttatatgtatttatagatgtttgtggagaaagatgaaaaaatattgacaatactcgacctgtacaatgcagagttgatgaaattcagaaagtatgattgcaggaaaacaaagctagttggcttccaactggtaaaagttcacactatgaagaattaactccctcacacttcctgtctgtatagccctatgccttcacaagaacaagttcccacaccagggtcaagaaggaaaccgtaagtcaagacaaaagtgcccagtgaaggcagaagatgaggggtctcaggttgcatcttcggaggcacgaggattcaaaggtgaacaaagcacacagtacatcatttgatgtggtaagtttcatggacatagaagtaagggggatgaaatgtcgaggtgtgtgtggcgggggaggaggggaattcaaatgatattctgatcattaaataaacttgaaacaaacttggaaaggtgaagtaaaacagcagccattttcctgacactcaaggattgcttctgcaggtggagaaaacgacagcttcagatattctatgatgtacagatgccatttatcaaattctttgatttcaagtaataatggtgttggtgcagccagagttgcaaaagaggactgttgattccaacacagtctcaaagatggttgaattatgtgcttctactaatgtgtctgttattctggagcccatatttggaaacccagtctaaaaaatgcatcttaatccctatctatgattttgaaaccatttaattatttacttctccatatgtctgaaggcagtactacacattggaagtttgaggaaataggatacttaaatatttatttaagataattgaagagtaattagtccagggaaagattataggattccctagaggtatagggcctactggaggtgatcaaattaaaatgaagtcattcataatgattttttttcactagtcctctcatgcctgcatgatgagaagatatgaacaagtaaataattggacttaacctgtgcttttcctacttgcataaaatgaggatgttaatgggaattgtggatatgtgaaagatgaagattatgatgataggccacagaatttaagtttagtaaaatggaaagtgagagcatttggtggttagagagtaaaaaggtagtagaaaccatggtttggacaaggcaattaaataggagtgaagtagagcaaataaaaggaaacactattaaggcagaaggttgatactatagaattctgagataataatcaactattgtttggaaataaaatttgtttatatttatacttgcttattttaccatctcattttttggttaaagttacaagaagtagagttatgtcctagttttctgtaaccagtgacaatagtaaaaacaagaattaattgaccacatactatttttgagactattttatgtgattttattgattaaataattgatatttcaaacaactctgtgaaaaaggaaatatcactaagcctattacatagacaaaaaagaagagcagagaagcaaagcatcacagggctggtaaattgcagagctgagattagaacgaagtagtttgactttagagcctgcgtgcttacctggactttttcactttcttgaccagaatttagatctgatttctagctatctttcttttttcccacatagccattttatctgactgaaagattatagaaatatgtgcacaactggactgaatacttgattgtatagttaactcatagtgatgccagcctctaaaatggcttacatgatgaaatgaagaagtatctctgctataaaggctttggagtaatgtatttgtgaccatatttgttcatgtttgtaacaacatcagactaaaatggagagttctgatcggctgcacaataaccactgtgcaaacattcagcacagtcatcaaaatatcaaaaacagaaaaaaaaaaatccaggtaatgtaaggctataatcatttcagaatatttattaaatttaaattcattgtaaataattctgaatctcatacctcattatcacagacttaatctagataataaatataaaaattacattaaaaattctgtaaactataaaaaaattaaaaaggatttgatacagacttgagttttggtttgtttataatcttgactgttgctatattgacccttaatttcaacagtcactgaaaatcataaggtaaaattacttcccagtttttttttaagtttcttaattagaatttgctttctgagaacactcaaaacagctttatgtgccatgcaaagtaattaggggaattcttattactcttgcaactaggagatggaagcatcaaaaaattaattgaataataaatatcaccatagggaaacaacattatttgaatatcaccatccttctggcttgaatcccagaatgaaggaaactgatggattttcagaaaggtaggaaacaatgtacaggttttgttttcaataattttttattcaattctgtacatgaagcaaatattttacttctaaaatatcggtcatcgtttttccattatctgaaattctataggaaactccaagaatgcaaaagtggtcatatgtgtgtttgtgtttgtgtgtgtttgtccatatattcattttctcaaatgtactatataagagcctcattaatactgaagactgcaaaataaatcataaaaatatttcagcactggttccaattcaggcagaataagtggaacatacatctgctgcatgttttattttattatttaaaatatccaacaataaaatggaagatgaaatggtttgctcatttaatttccagatatcacctcattttgaagagataaatgtggtatcacctggagattgttacaaaatatttcaaatggaaaggcaagtgtaaaacccagaataacattgtgaagccaatattgatcaataggtggagcatattaccggaaacaggaaattgttacgttgaatgatttctccatttaggtgctacaggggcatgagaggccattggaattctaccttatgggtctcttccccactgctaactatgtaaacttgtgttcttgcacctctgaggtgtgatctgatatcatttctacaatcctccatgtattagtctgtgttcacactgctttaaatacccgggacttggtaatttataaaggaaagaggtttaattaagtcaccatttggcatgactgaggaagcctcaggaaacttacaattatggtggaacaggaagcagacactttcttcacaagttggcgagaaaaagaatagcaaaggagaaactttcaaacacataaaaacccatcagatctgatgagaactcactcattttcacaagaaccgcatgggggaagctgcccccataatccattaccacctcccttccacaacacctgggaattgcaggtccctcccttgatacatggggattaaattcaagatgagatttgggttggaacacagagccaaaccatatcattctgccccttgcccctagcaaatctcatgtcttttcacatttcaaaaccaatcatcccttcccaacagtcccccagtcttaactcattccagcattaactcaaaagtccacagtctgaagtctcatctgagacaaggcaagtgccttccacctatgagcctgtaaaatcaaaatcaagttagtaacttttataccatggggatttaggcattgcataaatgctcccattccaaatgggagaaataggccaaaacaaaggggctacagaccccatgcaagtccaaaatccagtgggacagtcattaaatcttaaagctccaaaatgatctcctttgactccatatctcacatccatggaacgagagtgagcaatgtattaaagaaacaggtttaattgactcacagttcatcatggctggggaggccacaggaaacttacaattatggtggaaggggaagcaggcaacttcttcacaactgggcaggaaagagaagactggaggagaaacttccaaacacttataaattcattagatctcatgataactcactcactatcatgagaacaccatggagaaaaccatccccaggatccaatcacctccctcccttgatacttggagattacaggtctctcccttgacatgtgggaaatacaattccagataaaactcgagtggggacacagaatcaaaccatgtcactctaccaccacaattactctgttattcgccaacaggaaatattttacttcttcaaaaaaggcactttcacctgttttctttattgctatgtgatgttcattcaatctcacttacccagtgcagtttccccaggcccagagatttctggttaacacctattcttggcatcttagttggttatcaattttttccagaatatatttattgaccactaccccactccattcattttgattaaatgtgttaaacataacccatgaaaccagcactttcatgtcaatctatagttttcataatcttagaattcttcagattttattgaacttagttttgttcatttaaccctcaaacttgtaagcttggtggaattttggtttggggttctttatatctctagtacttagcactaagcatggcataagttctcaagaaacattgacattaattggtgatttgttaaattttcattttattcccaaggaggttcttacttcacaggttattcatataacattttgcaaagtaaaaatgttaaaaactaatcatatttttaactgtatgtgctttccatttgtatatgttccatgtgagtattttaaatttataagcataacgtatacatttaaagcaatatacaaaacctagaataagtattttctacaaatttaaaaaactatacaaataaattaaaaatatagattttagcaattctgatttcttcaggatctgcaggacaacagccgcttgtttgtgatttaaaagcaccaataaaattgaatatgaatcacatgaataagcagacccccactcaagattcaggtactgcaaggtgtctgcatttcgagacaacacagggtttcaattacagcaattactcaagatgttaacaagggatactactgtaagatttttatgatggtcaaaggataaaatacagcagtagaaagaaaatacagacaaacatctaagatgattgagacattgaggcatatcttccagggttaactgtcaatcacacaggatgtaatttgtctccagaccatgaactgccaaaaatgtataatatcttggcttggggaagactcattcatactcaaggtggtgttttttatattttataaccctctggaagcatggccatattcaatagcagaaataggtcaaaacagtcaccagatgcaaacatgcattctggatatattctgtacagaatggattggaaaggttgcattccttctggaagaggtagggaagaacaatttccttgacttttccaggttctagaggccaccagcatgtctcagcttgtgtctccacatccctccaaattctacttcttctcattacatctttttttgactctgatcctctgactccatcctataaggaccttgtgatcacatgcagggtaacctctccatctaaagatcctcaactcatcacatccacaaagttccatatacaatgtaaagtaatatcagtatcagatattaacaggtagaaatcgttttggaggagatcccacagccagtttttaatttgggcattgggtgttggcagaggaaccaagtgtaaattataccccacctgtttaaattctcatagattggtgggataataattatcctgtacatcgatttactgtacttctactaacaagatgcttcacctgtctgtttgaatatctgtaggaatatgcctcatttttcatcttgaatcagtgtccatgatctttcccaaatttgacctcctttaacatgttgtccaactgtttgctgagtttgtgtaatctatttttaaatctatattatgtgttcaaatttcttgacactttttaaatatcatcccttctaattagccaataaaatcaacgttttttccctcaatatgactgttttttaggttcatttatccttttctaggaatcctatttttatgtcaattatatttaagtctctttttcacagcaacatttaaaggtatgatcatgatgtcgtgtttagtgaccaagcttttcttaggatttcataaatttaatccatttcctgccactgcaattttaggcagagaaaaaaaaatagaagaagtgaaaatgtatgtaaattcctatgccattccccattatcgctttcctatattccttaccttatctcaaccattgattagatggtgacctcttcacttctacatacatttgttcaatcatgtgactcatctcttcggtcttttctgaaacctcagttttacaaacaggtgtttcaattgtccttttttttttaaatcagtccactatcttgtgacttgtaaggaaaatgatactttcatcgtacatgtttcttaacctcaaacaagtgttatggtgcacctgcagaaaaatgatctcttcatcatttgacaaagcagtggatccaaactgaaataatgtttctagccaaagacccctagtatctttatggcatcttgttcaggtaccagatatcagatatgcaagtccaaatccagaatcaatataatttaagtcagtatcccctaattattcagttagaatcctggaaggtggttaaatgtaacagatatgtcatttatgggtcagcctgatcctcttggtaacatgaaacataactgtctttaggcttatatgtcttttgacaaaaggccaagtgttattcaaagttaaatttttgaagaagaaagtggagtattctccttttattctgctaattgttgcattgctcaaatgacttaattacctctcattatgtctacctaagaggccacttccaataaaagattgaggtcatcagtttgtttattttattcccctgctgaagtaagaaatgctttttttttccttctctaactgcatgataatttttcataataagcactcgacactgtgattccttttagtttccagtcatttaaggcccattttttgaccacatagccagtttattggctactgtccaaaactgatataaatccatacactattattattatcactccccagtttctctgatagcatgggcaacaccattttcttcccaatgagtggatttaccttcaccccttatgaagtacgtgcaattatccaccagttgtagtacagctgcttccagattgaaggccagctctccaccgttgaaaagtaaaccctgctgtgttttttttgtttttgtttttgtttttgtttttgtttttttgtttttttggttggtttgtttgtttttactgagatggagtctcaatttgtcacccaggctggagtgcagtggcgcgatcttggctcactgcaactttcgcctcctgggttctcctgcctcagcctccctgtagctgggattacaggtgggcgccatgatgcccagctaattttttgtattttttagtagagacggggttttgccatgttggccagctggtctcaaactcctgacctcaggtgatctgcctgcctcagcttcccaaagtgctggggttacaggtgtgagccaccgttcctggccaatctgctgcttgtttagcaacctccagtaactgatcatatataggaactcatttggcagtgaagtgagggcaactcctcaggaggaaccaaaataacaagactcaaagacatggaagaaactcttcatgtaggcaatatgtgcctccaggggtcctccgacacaggtgcttgagcatttgatgtggaaacatgtttgtacatttccctccctactggaatgttgttctgacatagtccatttcatgatgggtatatgatatcaaataataatttatgcattcttataatgaagaattttaataataataataataaaagcagttttaaataaagcccagaataacagttgcctttcaaagaaatgtatttagtagcagcctcaagtcactttatagtaaaatcttaacagttatgggtggcagttaagaacttattccaaaattcctagtaatgtgagtacagtggctgacatttcaaataccgttgaacctgtttggcattctcagaggaattatctgggttattactctttgaagctccaagagagatggcttttgctcagagtcccatgcaaattaactttcataaaaataaattggtaaacacaaaacaaagaaaaaaatagtttgaataataggttagtatgttcctcaatatagtatgaaatttctctagaaaccaaaaatcctattagtcttgtgcacctttttggatttggagcttgcagagaataacttgtatgtgtatgtgtgtgtgtgtgtgtgtgtaagagctctagtatctctgacccaggtaattcctaataatttcaccattttgctgtcccagtattttaaccagctatttattagttaacccccagttgtcaaacgatgagtccagggagaaatgaacattatatcataaacataatgaattacaatattttaaataaaaatctaaacctcaggttgtcgtgataagaaatataattttaatatttctgggggtgaaaataaacatgtattggaatcaaccccacaggaatacaaataatgttttattttctcctgaaaagaaagcattaatcaaataggttacagaataaaatgacccttagcttgttggttagtgctaggataacctataatctgtatttttaaaaaataaaataacaataataccaaaataccttgatcacaacctcactttatacaaaaattaacttgcaaatcaatcatagaaagaaatattttaaaagtacaaaatatttgcaaacctaggggaggtaaatatttcttggccaggacatgaaagcgctacatatgaaatagaggacaaatgggttacatccaagttaaaaatatctattcattacaatattttttttgtagaaaaagaaatggcaccaatacataaattaaccaaaaaaaaaacatattcataactaaaaagctttaaatagagtacaaaaaacactccaacaactcaataatgagaagatattaaaattaaataatacacaaaaagactggaacaggcaattcacaacaaaagttatgtaaatggaaaaccagtgggtaaaacaatactcaatatatcattagtcatgaagggaatgcaaattaagaacaacaagatactactattattcagtgcactagcatggcttaaatttgaaagaacgacaacaccaaatgttgctgaggacatgaaacaaccggaatccattatactgaaaagaccatataatggtatatccattttacagtctatatgacaatttcttatcaagctaaacacacattcattctttcacaaagaagtttaacttacagttattcaccaaagataaatgagagtatataagcacaggaagaatttatactaatgttcatagagctctgatttttaaaaaatctaatactgtaaacagcccaagtgatagtatagccatgcaatggaatattactcaacaacaacaaaaataaatgttgcaaatagtcattgccaataatgcaacaatatggaagaatctcagtttatgttgaatgaaagaagccaaacagaaaatattgtacaatttcacttataagaagctctagaacaggcacaattatgatagtgaagatcagatcaatgtttgctttagataggacatgaaagagatttcctaaaaggaaaaacaggatcttcctaaggtgatgataatggtctgtatctttgctgaaatggtgagtacagaaacaaacatatttgtcattgagcttgcactacaaattattgagctgtacactaacctatgcattttattgcatgatatattctatataggatatttcataatatattctacaaacaccctagtgggacatcaacaggaagctgtgtacaaatatgcttccaccaactagaataatgtagcatagtacatgaaattaattacagtcttaaattataaatagataatagaggtcattcagcacaatcctatacgaaaattagaagtaatagctgctgcttgaaaggtcatagggtcatcaacactttaatttagcattcaccattatgggaactcattttatcacagtgtgataatagctttcatcattgcaaaagtgctgatatgatcaagaaacttccatgacatctttcctttagtcctggttttgatctttgaactgtatgatgtgggatgcattcctcctcatgagacaatcttttaaatgaaaatatgtatttaacttattatggtttgcagtttcccacactgaaggataattaattccactatacaacacattaattttcaaatgtgtaacccttttggttatccttcagtttgtcaatatccctcactgaaaattgatcttaaaaataaacagactaggtaaggtgtgatctgaggagtagagctctattgtttctgaacactacacttctaatcacagtgtgtctgctgatttgtaaatttgagtcaattaaatccctgcctaacccactattgttacagttcattagctttgacctaaatattagaattacgcttattctcttacattctattacattttcaaaaccaattttttctacattatgattccaatttcaaataagctaaattgagacaaatatatctaatatgtctaaattcagatattaagaaaaagcatgttgaatcagacagaactattttatccaggagacttacataagacaatagtttggcagttgtccataagaaactttctaaatctattttcactcagtaaaaatagcatgcatgatttattctcctcaaacattcacttttgtttttcatagaacacatttcaagcaaattctgattttaagctttccgttgctgttaccccattttttaaatttgctagacatttttagcactcttaaagcacttgtgtaataaattgttatagctctttacctttaggaaacatttgattgaaaactggcaaacaagtaattacaaaactccgggatgcaacaaaaaattactccactattctaggtagtttgtctgtaatagatgccctctaaatgcaattttattgattgcttccattttgtatttaaaaataaattctagtaataattataaaaaattaaatttctgcttggtaaatttaatgaatacatcagatgttaaattactttgcctatgagcacatgacctctcataattaattaaatggctcaaactcattctttttatattaactccagagaagcctgcagaggagttattctatatttggaaaagggtttaagagtattgcttgttttattacaaaattgacctaacattagtgtggtattaaaaaacttgatacaaatgaagtcagaactagagcatactgacagatcttttgcctgacttattttctagatcatttgaattaattagggtaaaacataagatttggatacatttatttatatttgacttaattttgaactaatagaaagacagtcaatcctggaatttttatttatactcaggctgtaaaatggattgtctcatttttaggttactaaatgcccttgtgttgtgaatatgtggaattataaccatcaggaatgtttcttacctcattcttcaagcagatgactagaattccagttttacactagatcattattttaaatgaaacccacttggtctaactgtcatgtaatcagaagagtcacaccatggtgaatttaattaaagacataattatatgttttcacttaatcagaatagcaaccttaatctttacctacagaaaagactcatttgccaattttacatgacatattttatacagttagtgacttaaaatattattttatcacatactgtcattaataatgtttattgataagaggaattcaaaaggcactagagcaatttagtgcacatttttttaaaagcaagtgtagactcttcctatggtaagtttacttaaaaattatgctactgtgtaatgtttggttgttgcaaaatatgtcagttactccaatgcaacagtcaccttttggaagacagtatctggtcataagtagcatttgctcatgagttaacaagtagaataaatacgatgcatacataattatgagtttaccactaaacctgattaaggtgacaaattcaacataaaatatctcactactaaatcatataatgttgtaaacctgtgtgaagtattgtctggatctttattattctaaatattcctgatattctgattaatataattgggagcctcttgctttaatccctcaggttagaatggttacattctctttatacacaaatgctggcctctccttaattttttcttctattgttgacttcattttagaatagccacaattaccagtaactgcattcctgaattttctggaatggcattttaacaaaacattcatgtctgtgtcacaggaatcttggggtattgcttcaccagccagaaacctctgtggtcagtggcaccattgcttgagttttgctcggctgttgggcttgttctgcccactcagcatggcacgctgtgctcagcttgtgctactggcctggatcccatgcctgccaaaggcaagccaagtgcaaagtggcaaggggtgtgtaagcaagcatggattctgatcactgcacacagccaggcatgctgggtgtggcagggtgggtagcatcggactctggcatgggcactggctaactgtgaagttgcagctggaccaggtgtcccacaagcagcttccatgactggcactgggaaatgtagcgaagcttggagaagccagggaccacaaagtcccaaagagggtatagccctggcttggggagtcaatgtatgtaatacatttatatatagttatataatacattaatatatattatacataatatatttatattacatataatacatttatatataatataaagaatacatttatatacatgtacacacaaacacacccacatatgcatttaaacaaggttttacaaagcaatactaaatacagtgatatctgatgttttcaatcccattcaattttcttctaatatacattaattaaaaattaagcaacattgcaagctatatggttgatttacttacccacagataggtcacactctgaaacctaaggacttactctttgaggactaacttatttgcagaggattttaaaggaggagatgctagcagaagaaaacataatttcagcaaagatagtgtttattattttaaaaacttatattgtataaagttgggccattcacaaatattttactttacctctcctttaaaaaaatgttaaaatgttaataatgctcttctgaatctactctcaaagtagacattgttattaatcttggttgggccaaacaaaggttaataaaagtaatattacacttctagagagaattaggaaacagcacacattgccaccttctccctttactgtcgtgatgaattgtgttccagacggagcaaggtctgccatatttaattccagaatgagaggacactgcacagttccagccaactcccaatgaaccagtagaatcaatgagaaataaaacttttttgttactatagcatagtctgaaataaaacatttctttgttctgtaccatagtccagttgatttgacactcaaaagtgagtcatgaactaacataaaataaaaatatttggtattggcttggtagtttgctgaatagcagcaatgatgctgtttcagagtttggaagaaccatgtaagtgccaatgaaatattaggggacattttgacctgcagtaacttggaaaacagcataacgaacgtacatagccttaccggaagtagttagaaaagaaaaagatagctctatttggcaaagtacaataagtacatgaacataggaaagaactgactattttttgagcaacagtgaaaagaaataaagggagtccaggaatttaagaactttcaggattgtaaaggaaacccgcttctcaaccctaaaggttatgtcgaaactgaggtcattgagcaataaagagtaattattattataatttgaggcaagggttaaaagaaaatattctgcctctcaaacctattgttaaagaattctgagtggaatgaggtatctcccaataaagatccaaataaacacaagatacccaataaaaaattgacataagcactcactgtctaggctcaagattctttaaattaagtgagaaacgcacattgagaaacagacagaaacaaagacaaaaaaaaaataataaagaaaacattcccctgaaaaaattaaaagaatagacatgaagcagaatcaacctttcaaatgagatattggtctggtgttatgatccccctcccacgtgatagcttatcagtgtctcctgatgcagaaaattactggacatgaggatcaaaaaagtgatagattttattaatcactataaaagttttgagtaataagaaattttattgcacaagtatcttgaagacagtttgtaatatcagtaagttttggatgataaagttccaaagaacaattaaggtatattaacacataaaacaaccagctcttgaattacaatataaattattaaaataaggctgtttaaaagatatagggggaacaacttatgtatgatcatgtcaaattttataaatgaaaattttaatacttatgttcttcacctacaatgttgtgacaatagtgacatttcagaaataagtgttcaaattttaagtaataaaatatgaaatataattaatattgagtactgaaagttgattctctgtaaatcggtcttctctgtaaatcaatcaatacctgcagctgtccagtagaggaatttttaattaggcattcaggttgacttaaaatatacctgctgggttgataactaaatctattccatgttataaatgctaccacataacaaaaaactgagtatgatagctttatattagcgaggcattggcataaaccagctttgcaaaaagaatgtcatcattaacggacagaataattaggcatctataaaatatattattagtgtcaaagtttactaatatccataaaattaaacttcattttactcaatatatttcactttagttattaaaagtgtattctaaaatacgtttaattaaatttattaaaattatgcttttaaaattaattcgaactttgaattaagatgtaatggatgtcttcagaaaaactgatcaagttttgaggtattacggcactgtgtaaaattatttttgattttcaaaaaaatgtgataataaatagctgttgcagtgtcattttaaaactctttatctcttttagttaactttggcctggctttagttccagcatcacaataagccattaattattctcggtaacaataaatctatgagtaataaaaaggaacacatattattttttcctgaataattaaataagatttttagttgacagtacacattgcaatagctttttgtatcctattaagataatagttcaataaatatctaaaatgaaataatttaatattggatacatttgaaaacttggatgtcagtgaaaacgatcagtaatcttatttgatattttagtatcatgtaaggggcatattatctgaaataaattaaatggtttaatcaggagcaaatgtcatatagaaagtcttacttattacttcttaagaaaaaacggtctacacagagaaggtaaaagctactaaggctaatcctgcgaaacattgcacagttagaccatacttgtcatgtcagcctatgatataaatataaaactcttacaaaattttcttgctatgtatgctaaatatattttcaaattaatctggttgcatgatgttagtaatcactaaaaaatgattttgggaaactaaaagcagaagaacataatatgggatacaaataattgttctaacaaaggtagcttacagaaacacattcaagactaccttcaataatgacagtttgggaaactaattaatttcagtccagaataacacatataaagtaaaaacaattatttataaaaataaaataaaatttaaaaataacaatttcaacaaatttgaaaactcccaaagtgattcataaaaaacagctactttttgaggtaagaatggtaagtatatgaactttttgactgagaatatggaagaggaaattaaaactaactaggaaatatttaaaatgagagaactgtagaaggactaagataataagcattctacaaattctgggatgactgataaactactttaactacataaacatgaagaagccagaatcctcgtgaagatttaaagcctgggagacttgaaaacttgctgtgcctgtgagagcattctttaatccacatacatctgaaatggcagaaagcctaattggcttgaagagtctaagcacagcctttggaaatcattttctggcctttaaaccacacaagtgcaggatatatctctatggagacattgaccaacaattgtacacagtaggggatgcaggtttgaaaatttgagtctgggcattttaagtgcattgaaaaattaaaatccatttaccttcaaagaacaacacaaaatgtatagtcactaaaatgtattttcaaaacgcccagtcttcaaaaaaagaattactaactatgcaaaacaataagaaaatgtgattcttgttctgaaaaaagcattcaacataaaatgacttcagttagactgagatatcagacttagcaaacaaatgcttcatcaatttcctaaatatattaattaacagaattaaaataatatatgcttaaaataagtgaacaggtagaaaatctcaatgaaatcaaataaaattaatcttaaagaaaatttgaagtaaaaaatatgataatgtcatatttattagagagatctaattcaaattcaagatgcagatgaaggaatatgtatatgagaaatataagaccactagatgcacaatagggtcttaataaatgtatttattgcaagcatgaatgaataaataaagacctaaggaattttatggaagtagttatagactgagtaagcacactattttacttagattctatatcatcgtatgtatattcatggagttgagactgtaactaatggtactcaagccaccaccaagccctacttactttgtcagttgcacagagaagaaaccagccctaatgtctatccatttctctcctcaaggcaactactatcatcaatttcatagttatgtttcaacataattcaatgtatgtgccttcatctaaggttattttctttagctttgttgtagtataatttacatacaagaaaatccactcatgttatgtatccagttggacgagttttggtaaaactataagaaatgtaaccactaccactatatagctttagaaaactttctgtctcccccagatgttctttcatgttgttttgctttcaatttgtcctctgatccttggccactggcaatgactagatttctgacactatagttatgcctcttaaacaatttcatataaatggaatcataccgtatgtcctttttgaggcttgtttcttttacttatcattagtttatttttagaggtttcaaggttgctgtatcagtatcttgcttattttttatttgccgggcagtatttcattgcatgcaaacaccaaggtttgcctatccatttatcattttgacattttagcttattccttttgggactctcatgaataaagtttctatgagtattaatttacaagtgtgtgtggacatacaattttatttctcttgagtgtacacatagagtagaaatacttagtcattcggtaattgaaggtttaaattaaaatcaaaacaaaacaaaaatgactgtaccattttgcatgtgaaaaaaataacatttgcattttgacaagtggaatatggaagcttaaaagaaagacacccaactttctaaggtaggttctgacagtttattggattagttaagctgggcaactggagccgatgaggtctgggcatgactaagttatcactgaaggtttgcatcattctactatttgcagtacgttgatagtgccctcagttaaacgatgcatgaatcaaagttaacaaagttgtcccattacacatcagtcaaattagctgatgaaatggtgtattcatgagaaaactttccagaagccaaaacagtggggaaataagggaaaaattttggagagggagtgtaaattttccatgggtctctcgcactactgcctgttttctgagcaagggacattaacaactttattccagattgtctttttaagaatattttgtatatcaaacacttttgagagatgtaagtaaaattttccttactcgtgtctttcaggagggcagatttgtttcctgaccaggattataaagatgatactcctgttcagggaaaaatttgagccggttttcagcaacacacttataaggctatgggcttccaaagctaaggttcctcagctgtgacataaattcattgtgttttctgtatcatcctgtactacttcacatcagcctcatggtcctcagggaaaggggagtagttgcaaatgtatgctacctactgtgctgtgagggaaaaaaaatgcctttggctctaaaccaggaggccgtgtcttctgccagcatctataaagctgtgacacactaactcacaagcttacagataaagtaagttttcagacccttcactgatcttgacatattggtatccctaaacataccttccaacgtagagagatagatgctaacatgcaatcaatactggtatttaaagtaagagatgcacttatgaaaaagaataatgcaatataaagaggacagagaaacggtggtggatgctgttttatctaaggtgtttcaacactgaaatagacttaaaggaagtgagaacatgagctatgagaatgatgcaaacagatggctgcattgtttgtgtaaaccctcaaattacttcagttgtaaatattttatagttcgcgtttttaaatcatttccatgtataagcattctcaaagaaaaatcctaaaattaaacttagtgaaataaaataaaacaggaaatgtgataaaagtgaaaatgaacgaacgtaaatctcctgcaaagactctctgatccttggagctcacaaactttagctctcagtgtcctttcctctttagtccatatacccagcaatggccgagcaccttctgtatccttgaggtatcttaatgcttttatgagagtctggggtctgtcaacttctcctttttcttttttgtaattcctatattaaattcagtaagggagtcagaaactcatgatatatgccatcatatttctgtttctcttttgatattgagaatgatttctattttttttatatttattctctgtaaataccctcaaattatttgaggacgatcacagaatggtgacatgaaacaatgacctgtcaaatatctgtgttaaaattagacttcttaagtattttgatttaatgtggccttacattttctttattatgaaaagtttatttgtcatttaacaaatgaaacgtgaggttatgcatacagccaacatcacatttacatatatgcacccacacacataaactttcctcattcagaagaacgatcaggtcaaactgaaatatttgtaatattattgtaaactaggaaagtaacacttggttcattccgataagataatgaataaacataatgctatagttttccaacttgtcgccaatcctataatattcatccaccttgtgatgcaactgttgggaagtgttaccatgttcaaaggttgtcatatatattttaaatatatatattcaaatataaaaatatgtataagtatacatatatattcaaaaataaatacacatataaatattactataaatacatactcggagtaccatatttgtaattgtaaaagcatgttgctgtcaacaacaaataaagatagatacctaattctaagtcagctattgggtagctattaaatccctaagagagggtctgattccagatagctctgtaactgggtcctctttgtggtcattcactgaaagagaatagtaaatggcatagtattctacagaaacacaaagataaagtaaaatgactgagccataatacataggaaagaatagctttagtttgttggaggctaagaagaaatagctacaaaggagaaatactggaagggagaaaattgaattggtgtcttttgtgaagagagcaagatgcagtttgtgttatatcctgaaggttattctggtttctgcatgataacttattctgtgtgatataaggatgcagggtttttgttgatgttttatagtctttttattgctcttcctgtgtggtataaggatgcagggtttttgttgatgttttatagtctttttattgctcttcctgtgtggtttaaataaagtcataattactgaagtaaagctgaacattttagaattttgtctgacaatcggaaaagcctagcaaacgttgcctagcaaggataaggttgtatgagtttggaaaaacagggaaatttcaggttatatttcaaaagtaaacatgtatctatgagcatgtagtaaaccatactgaaacaaatactttttattcaaaatcccaagcctgtaattcattaaacattgcctaattctacaaagacacagatagtcgtatattggaaataaagaaacagcaatggaggtgtataacttattaatcaaatataaaatctgaggaagtaaccaaactctgtgtatatgagtttgtatgtatacatctattccggaagcagagtgctttcatgaccttagcacagtgctgggtgtaagatgacaaggtgacagtgagagaggaaagtaatgtattctttaataatttttagcaatgctaatttttgtgatagagaataaatgaagattcttttttgagacagaatctcgctctgccacccaggctggagtgcagtggcgtgatcttggctcactgcaacctctgcctcctgggttcaagcgattctgctgcctcagcctccagagtagctgggattacaggtgcccgccaccatgctcagctaatttttgtgtttttagtagagacggggtttcaccatctcaggctggctaatctcgaactcctggcctcaggtgatccgcccaccttggcctcccaaggtgctgggattacaggcataagccatcgagccccgccaaatgaagagtcttatgactacagatgatatggtttgtctctgtgttctcacagaaatctcgtcttgaattgtaatccccatgtgttgagggagggaggtgagtggaatatggggcaatttctcccatgctgttctcatgatagtgagtgagttctcacaagatctgatggttttataaggggctcttcccccttcgctcttcacacactctcacacctcctgctaggtaaggtgtgcctacttcctcttctgccatgattgtaagtttcctgaggcctcccagccatatggaactgagtcaattaaacctctattatttatagttacccagtctcagatagtatctttatagcagtatgagaataaactaatatagtcaattggcactgcagagagtggggtgttgctataaagataccaaaaaatgtggaagtgactttggaactgggtaacagggagagattgaaccgtttggaaggcacagaggacatagggagatgtgggaaagtttgaaacttcctagcgatgtcttgaatggttttgaccaaaatgctgatattaatatggacaatgaagtccaggctgaggtgatctcagatggagaagacgaacttgttggtaactggagtaaaggtcacttttgctgtgctttagcaaagagactcttggcattttgcccctgccctagagatctgtgtaacactgaacttgagagagatgatttgaaattggaacttatgtttaaaagggaagcaaacttgaaaagtttggaaaatttgcagcctgatgatgtgaaagaataagagctccaactttccctgcagtaggatgtcccaaggtgttccaggattaaagcatcagcaaagtgtttttgtctcttaatcaagctatacctttcaccttaatgtttgacaatactaaacagatacttttgttctacctgtataggtttttttgtcttcatttttaaactgatttagaattcttgtaaggtgaaagaatgctggttatgccccccagatttcttgtaattatctactcttccactagccctgaaagtagaaagtacatacttgtatgtatatcacatataagttgagtgtgcttactgatcaaatagctcccacatcagtgtgattctaaatgttaaaatctttttaaatcaactcatagccctacagctttccatatgtattgttattaagctttaccactcttttgatgtaattatttgtacacatacttgtcacccagttgtcttcccctttaagacagataactaataaaaatactggttctctcactcatgttttcattagtaaagtaactgacacataaccatgacataaaaaaaaccaccaccaccaccaaacatttgatgaaccaattaccaggatgcacaaaaaagtagaaactgagttatgtttatgaagaaaagtggtcataggcaccatcaaatgcatacgggagcatgaccataaatctgatgtaatactaatggcacaggcatagctacaaatattcctgaaagagactggcctttgggtgaaataggaagagcatgccaagctaaacagtaaaactcagggagtgataacacttaaaagtggagtcaatttggcattccaaatattaagattctaattttgtaggcatcctttaccctaatgaaatctcccacctaaactttctttttcatttattattgttgtcgttgagagtttgaatatgaggttcagacttatatcatttattgtttgcatgtagacgtctttttataggtttttattctatctagcataactttatctcaagtgcaatattataaaacacactactgtttacaacctataaccttggtcttctctaattgatagaggcacaaggaccttcagagcccattttgccttcactcagaggcccttacagatctattaagaattataaggcacaatatgaaaaaaagaaccccctggtgtatttcagggaatgtcgaaaaaaattctcttatattcaacccacagcctgttttatgttttatttattgctaagaagtctctttccatatgtctagacgttgaatattttttaaagttccacatcaacactgcatctttatctaagattagtataccatgttctgattgctgaggcattaaactgttttcaattctagaaaaatggaggtatactgttattttcattagctttctccatggtactatttggattatatttaaattgttctcagttggctcgatgacagcagaaatgccaagattttgaacaaaaataactagtctgacagtttcatattcaacttacgaagcaattgatgatttggccggacgcgatggctcacgcctgtaatcccagcactttgggaggctgagccaggcagatcacgaggtcaggaaatcgagaccgtcctggctaacacggtgaaacgctgtctctacttaaaatacaaaaaattagccgggcgtggtggtgggcacctgtagtcccagctactcgggaggctgaggtaggagaatggtgcaaacccgggacgtggagcttgcagagagccgagatcgcaccactgcactccagcccaggcgacagagcgagactccatctcaaaaaataaataaataaataatatttttcatccaacaatacatatttacaagatttttatgtttgtacttggaaaatgtatcttctaatccagaaggcctattgaatgtgtgagtattgtgttttatatgcagatcacaaagtgtaaatgaatagctgatttacacttaggctgatattaatattaccattatgccatttaaaatcaaagctagcataattcatgagaaatcatacattaagttaacaacagtctggaaacaatggattcaccttttaacaaggtacacatttaaatatagttttaaaaatttgattggtacactgtaaaaacacagtaacatataaagaaatagagaaatgtgtgaaaagctcataaactacaaaagtgctgatgataaaaaacttaattaaaaattcaaaatgtagatgaaaatataaaattaaattaaaagctcttctcagccctcactccaaatttttcttccccaaattaatcatagttactagtgggctttttattctaggagaaaatattttatctgtctaccaacatgtatacatgtctgaaggatatttaatttttgattacaaaaatggattatatttatcagggctctgttaaaaaagcaaaatatcatcaagtgttgcttagtcagtacccagtaaaaatcttcatatgagctttcacatgtatgtgcttccacagtatatttggggtttttcaaccctttaattaagaaaaaagggccaggctcggtcgcttacacctgtaatcccagcactttgggaggctgaggtaggaggatcatttgaggtcaggagtttgagaccggcctgcgcaacatggtgaaaccccatctctactaaaaatacaaaaaattagccatgtgtggtggtgggcacttgtaatcccaggagaattgcttgaacctgggagatgaaagttgcagtgagtcgagatcatgccactgcaccccagcctgggtgacagaaaaagactccatctcaaaaaaaaaaaacaaaaaacaacaaaaaaaatgcagaaacaaaggaacttgagtaacctgctcacagtcacaaaatcagggtatgttagcattcatattgtcaatttcaacaaatggtgctgggacatttgattatctgcacgcagaaagatgaacttaaacccttacttgtctcatacaacacacagaaactaacccaaaatgggtgatatatttaaatttgagagcttatattaaaaattttaggagaaaatgtggaaagacatctttcagatttgggttaggtaatagtttcttaaatttgatactgagaacatgatctgttaaacaaacaaaacataatttggactttatcaaaattcaaaacttttccatctcaaaagacagtattaagaaaataaaactataagcaaggggctaggagactatgtttgtgaagtacaaagatacatatatctgacaaaggattgttatctaggatatacaataaactcttgaaactccatgagaaaataaccaaactaattttagaatggacaaatataaaagtagacattttattaactaaggtatataaattactaataagagatttatattaccagtaaaagcatctttagtcatcaaggaaatgtaaatttcaaacatagataccatttcatacatactattaggttggggcaaaagtgattgcactttttgccattacttccaaaggtaaaaaccgcaatcacttttgcaccaaactaatagtatgtctagttaaaaaaaaaaagacagaaatcagaaataacaaatattggtgaggatgtgaaaaataaggatttttaatatgttgctggcggaaatgaaaactgtgggaattttggaaaacagtctcttgaatgacaaactagtcggtgggggctgaaactacattttatggacaacgtgtggaaaaaaaatgcgaccatcaaaaaatgtgacttacatgtaaattcatggtgcattttgctaaaaatgatggtataaatatttgaaacattgtttattttattgatctaacaaatgttcatagacaaattttagaacaaaacgcaatttgtaaatgagaactctgagaactaacagatttactacttcaaagaacaatgttttctgtgattcagatccattccccaaaaagtccaaagttgaaaaccaatataaatgaaaatatataatttactaaacaataatttagccaaatatttacatttattataatgaatagaaggaaaataaagtatcattagaaaacaatcagaaataactctatgagaactgtcttgaaacttttgttgtgcaatggatatagaaatagtgtaacataaccctcaaaatgaggatatcaatttcagacagcccttcttcagaggcttcacatatactttctttgaattttgctttaattaccttaaaatatgcattggggaactttccatgtatcacattccggtgtatttcattcatttttaatggctacaaattatttcatcttgtgcatgaattaccacatattaaaatagtttcctactaatgaatataaatgtcatttcctactattttatttcaaatgtaaccaatagtaaatacattatacctatagcctaacattttcttaagtcctcctgaagagtaaagtcctaaggttggaatttgtgaaagaaatgtaacatgtgcataaccttttaaattaacactttcacattttcctccaaaaattttttaacaattatgttatcagctatgtcttttattagttatttcatattcctgtaaataggataggatttatacttacccactgtgttgtcaatgggagagctagtctctcttgtggggtctttaagataatcacttcagtgtaactgcagaaattacactccgagaggcatatgaaattgaaggatttattatactcacaggtcctagggagggaagcacggcaagtccagagggccacacaaagtcacggcaagcagagagaaaatggagtaaggacccctgggctagttcctttattgaggctaatagcaggggtagtttgtggcacatggggggcactctatctgagtaatttgaatgtagctgggtcaacatgaaaggaggaactgataaaatggggaagtcatcatgaggcttggcacttgaagacacatgttggagacgggtacccagaaatgggcaatacgtctgtaatagttcaaagcaagaatggcaggtgctggcactcaggaagccatcgaggcaacaaataacaacttcacattacacctacctctccgccaatattgcaaaaagcttgtaatgcaaactgtgaacattgttttccaagctgttgcttgaaaaatgtcattttttaaattttactgttctataattttgaatgatatctcttcttatttatttcttttcatgtcttttctgcaattttctagtgttaatcattttcagtttatcaacttttccagtcttgtgtatttaatgcacaggaccaatttttaaatatttgatgaattcaagtgtgactaatgaatactaaaatatactattgtattggcatcattacttggtctaataggctagtatttgaatctactggtgaattataacctcacaatctaagactgtgtggtaaatttttgctgaatcctatttattgttaaatgaaacttttggacaaactctaagctctgtgttcttgtaaacctgttgtcacgataaataaaaaatattaatctcaacattatttgctgatataacagctagcttgcattctgagtgagataagagaatcagtaagtaaaagaatttgaaaaaactgtatgtgccatgtgaagtcatggatggatttagggcaaagagtagcaactaagacagaaataactgggcttcaagggatctcaaattaagtcaaagagaatattaagaggctttttgagaaagacatcagatgtttgtagtacaagggaggaagccagcaatcttcgattttcctccagttttgctgttgattcacttattatttaaaatctattcctcttaacattctgtcttcaggttcctctgaccaggaaaagagaaggaagtgtggtttgggggcctagaaaatcaacctttgttctcccctttacctatcaaggtgacttatagaagcttaggacaatgtaaaatgagtttaaatccaaattattcaactatataatattaaaatcagagattttgattttaaccatctgtaatttgttagatccaatgacagtttagctatctctaaaaattggatattttttaactttcattttaagtttagagggttacatgtgcagattgattacttggataaattgtctgtccctggaggttgatgtacaaatgatcccatcacccaggtagagagcatagtacgtgataggtagtttttctaccttcccacttctccaaccctcctccttcaagtagaccccatgtctattgttcctatcttcatatccatgtgtactcggtgtttagctccaacttacaagtgagaacaaacagtatttggttttctgtttgtgtattcatttgcttaggatagtggcctccagctctattcatgttgctgcaaaagacatgatttcttttcttttaaatggatgcatagtattccatggtgaatatgtaccatattttcttcatctggtccaccattgatgggcatctaggttgattccagtctttgttgttgcaaatagtgctgctatgaacatagaagtgcatgtatctttttggtggaataacttatattcctttgggtagatacttagtaatgagtttgctgggtcaattctgttttaagttctttgagaaatctccaaactactttccaaagttgctgaactaatatacattcccgtcagttaacaactgttttttttgttttttactttttaataatagccattctgattggtgtgagatggatttaaaaatcagcttgttaagcaatcatgcataacacattaaaggaacattttatcttttaaattcaaatgtgaaattcttattttattcaatatctggattaaccagaaaatctaaacatcaactaatgtcagctttcacaataacatttctgtcatgatattttgggaaatgtttggtttcatttgtttcaggcaaatgatgattttataaggtagttatatgaggtagctatactaaatgataactcacagaaatcaccctgaaggttaacacttccaattatatcactgcctttgaatatgtcatttaataactgctttatgcattattagtatttatgcttttaggtggcatcaaattctattgatataatgacagatgattaagaaaatgaatgtaaatattgcatgtgtcaggtgtaattatttcaaatatatatatatttttataaaatgcaaacattaaatttcatcttaaagaagtttatttgctttggatatttatataaaatactcctttaaaaggaatggaataaatattttcaaatacgtgtgttgctccaggattgtttctagataacctgctgtaacctaatgtaagtagctgaagaatgcttaatttctaagtttcagaacttacaataagtttcaagactaaatatttttgcagcactgaaatgaaagaacaaaaattaaatgtgcaccctctaactataggaagtgatatcttataatgatgttgtacttttttagttatatatttttaataaatgactgttcttcattaacttggaaacatagtttatgacattacagaaggctgaaaacagtgactctctttgcaaagtatgaaggatagtgctaactgtataatcaacagatgaattaataataagtctaatgatgcatttctatcgttaaatagaaattaactgcttataattgacaatgcttttgaaaaatgctatgttgcgtactttgtttttacctgattttagaatctaaacttgtaataaaaacaaaaactataaagattcagggtcctggagctaagtctccaccatattttcagtctttttctaaatgagttagctatttatccagtcaggcttgttcttaagcctgccttggctaaaccacacagggttggactaatacctggcaaggtgtaaaggtttggattatgccaaatgtggatacagagataccaggtcttaagtttacaggcaaattgggccttccatagaccactgtctagaaaaacacaccacgcaacctccctccacacttaaaacgtactttacttaatttaacgtacttcaccacctcatcagtctgagtggccccttggaatttaaagatgtgccacctgttatccagactttgcatttacttaggttatttgcatttctgatcactctgttcaatttattttaaaattatctttctcttgagcagaataggtactcatgcccttgctaaccctggctgtacattcttaatgtaggacttcaaggaatatttttttcagtgcatatgcatgtgtgtatttggatataatcatacgtatgcatgaacagtttatttaaaatacgaatatactatagaaacgacctttaacatataagtatgtatgtgtgtgcatatggatgtgtatgtttcttatataaattgttagaggtgtgctttattgttgatttcgcactttcataactaataaagaataaatgctttaaaatgcatgcaagaaaaatgatatgaatatgcaccatttcatagcttagaacaatattaagaaacattacatttggatgctaatatatattgtttaatcaaactagttcgcgccgtaatctctttcatcttacttaaatggctccatttaccttaaataaggaatgaagaagcctgctatttatgcagactgttcaatctatgaagtattgggaaaaaattattctcaatagtcaaaataagatcacaaaatgagatgcactatatgccttattttttataatgatcttaaatggaacagatggcagtttatttctactgaattatgtttgacacataaaaccatttaatttttataccaatcgtcttctttaaggtagaaaatgttaaattattgatataatttttctagttttatttctttccattgtccctttacaattatcataaattcgacatttgaaatataaagcattatattttgtaacaagaaaagtctgttatgctcaagtattttctattaaatttttatatgcaaaactcaattacattagccattattttacttagaataaacattagaacatgttggattccttccgctaatcacagtgactgataatagaagattgcccatgttaatttacttatacaaacattagactgagaatatactctataaaatgtcttttttaaaatatgtaatccactttcccaaagctatactttatattacttatgcatacagtctactattactttacatatttaaaaacacaattgccaagaaaaagcactgtcaaacataatcaatatgtcaatttaaatgcattgaagtgttgagtaagttgagttaaagtattctgaaagaaggatccaagcagggtcagtgatctatagaaaatatacaaactggaagcatttcctttgaaaactggcacaagacaaggatgccctctcttaccactcctattcaacatagtgttggaagttctggccagggcaatcaggcaagagaaagaaataaaggtattcaattaggaaaagaggaagtcaaattgtccctatttgcagatgatgtgattgtatatttagaaaaccccatcgtctcagcccaaaatctcctaagctgataagcaacttcagcgaagtctcaggatacaaaatcaatgtgcaaaaatcacaagcattcttatgcaccaataacaggcaaacagcccaatcatgagtgaactcccattcacaattgctacaaagagaataaaatacctaggactccaacttacaagggatgtgaaggacctcttcaaggagaactacaagccactgctcaacgaaataaaagaggacacaaacaaatggaagaacattccatgctcatggataggaagaatcaatatcgtgaaaatggccatactgcccaaggtaatttatagattcagtgccatccccatcaagctaccaatgactttcttcacagaattggagaaaactactttaaaattcacatggaaacaaaaaaaagcccacattgccaagataatcctaagcaaaaagaacaaagctggaggtatcacgccacctgacttcaaactatactacaaagctacagtaaccaaaacagcatggtactggcaccaaaacagagatatagaccaatggaacagaacagaggcctcagaaaaaacaccacacatccacaaccatctgatctttgacaaacatgatgaaaacaagaaatcgggaaaggattccctatttaataaatggtgctggaaaaactggctagccatatgtagaaagctgaaactggatcccttccttacaccttatacaaaaattaattcaagatggattaaagacttaaatattagacctaaaaccataaaaaccctggaagaaaacctaggcaataccattcaggacataggcataggcaaggacttcatgactaaaacaccaaaagcagtggcaacaaaagccaaaattgacaaatgggatctaagtaaactaaagagcttctgcacagcaaaagaaactaccatcagagtgaacaagcaacctacagaatgggagaaaatttttgcaatctacccatctgacaaagagctaatatccggaatctacaaataacttaaacaaatttacaagaaaaaatcaaaaaaccccatcaaaaagtgggcaaaggatatgaacagacccttttcaaaagaggacatttatgcagccaacagacgcatgaaaatatgctcatcatcactggccatcagagaaatgcaaatcaaagccacaatgagatactatctcacaccagttagactggcaatcattaaaaagtcaggaaacaacaaagtgctggagaggatgtggagaaataggaacactttcacactgttggtgggactgtaaactagtgcaaccattgtggaaggcagtgtggtgattcctcaaggatctagaactagaaataccatttgacccagcaatcccattactgggtatatacccaaaggattataaatcatgctactataaagacatatgcacacgtatgcttattgtggcactattcacaatagcaaagacttggaaccaactcaaatgtccatcaatgatagactggattaagaaaatgtggcacatatacaccatggaatactatgcagccataaaaaaggatgagttcatgtcctttgtagggacatggatgaagctggaaaccatcattctgagcaaactatcacaaggacaaaaaaccaaacaccacatgttctcactcataggtgggaatcgaacaatgagaacacttggacacagggcggggaacatcacagtctggggcctgtcatgggatgaggagatgggggagggatagcattaggagaaatatgtaatgtaaatgacaagttaatgggtgcagcaaaccaacacggcacatgtatacatacataataaacccacacgttgtgcacatgtaccctaggacttaaagtgtaattaaaaaaaaaaagaaaatatgcaaaatgagagtcactcttcttatcctcggaccttgtttttgttatactcatcagatcaaagttggttacatctttaaaattaggaggaactccaggtctttactaccttgactgaggaatggaatattctctttctgatttcatgaaaatatattcaacattcatttgctttagattacatccattactaccatctctatttcagcctctttcgccaccttcactggtattactgcaaaagcctcctaagtttctccatgtcttcatgtgctctctgatacagaaagatcctttcaaagtgaagatatgatcatgtcaatacccagctcatcatccaaaagtagtcctgcattttactcagagataagacaaagtcgttacacagtttcactctgtgatttgtcctccgctcactttctcagtgagctcatctctgtattgcttttcccttcacaccacactacagccacatgagtcctttccagatatcagtgaaccaagcaccatctggcattgcagcatttgcactggttcttcccagtactcactcacatctccttgaaatctgctcaaatgtcaccttcacaatgaggtctctttcttggatgtccaatgataatcattaagtttctctttctaattggccatcccatttccttgagccatctccatgttttcattgtatgaataacatttaatacctgatatattagataacatacttctcatatttattgtttattttgtgctgctataatttaagcactatcattgaaaaaacccttctctttcttatttgttgatgttttaatctcctaagggcatcaaataatttctggaacatacgaggtatatatctcaaaattattttatatggaagaaatattatagaaaatgctctaaaatatgttttaagaaaatatattctcattttgcttttttaaaaactagaatacagaaataaaattgttttcaaatagaggcaatttaatgtagagtaatcttacaaatcagttggttaaaagagaaacagggaattgtttaaatgaaaagaaatggaggaacaaaaggaaaaatttttaatctcagaaatttgaagcagctaaagcccccagtttggaagtcataagcctacgccagctgctgcattttgtatagagatgaagaagaggtactttttcaaccaaagctagaactgtcaaaataatgttacatttgctgggctgctggattccagaatcacctaactgctactgcttcttcaaccttcagcaactaccagtaaccgccttgttgttcaagccagaattacaaagtaattattaagtaattacaaagatattatcttctgtatgcctacctacatcctactgacagaataaaacagaaattatacgtattgtaaaaagagcctgaaaagtgtaatctgcaaatgttgtgattgaacagagaaaggttagtatggaagtgagagaaaatggaaaatagccaacccaatcagtacctactaacaattaaaaccagatttttcttttggcatatatcaagccaatgaattacaggaaattttgaatgatagttatattttttcttattttattatataaataaaatatttttaatgcgtaacatttaaaaacatggactatttttgccatgtaaaatcatcatcatttaactgatgcaaaacaacaaatttcacttgagttttcttagttgaaaatgtggtagcttttaattaagctcttcattactatttttctgttttgtaatcttcagttaacattaaataacatgctctaagccatcagcatttatgattgtttaaagaatttaaattatctgccatagctaagatatggaactaacataaatacccacccatgaaaaaaatagatttaaaaatgcagtatatacatatgatggaatattattcagcctcaaaaaagaagaaaatcctgccatatgggacaacatgatgaacctggaggacattatgtaggtgaaataagtcagtcacaggacaaatattacatgatactacttatcaaagtatctaaaatagttaagctcataaaagcagaaagaggaatggtggctgccaggaattggggagaggggaaaatgggaagctgtttaatgagtataaagtttcagttatgtgagatgaataagttcctgagatctgccctgcaacatagtgtctacagttaacaacgctatactgtgtatttaaaaatttattatgagggtaaatctcatattaagtgcttttaccacaaaacacaaacacacacatgcacatatgcacatgcacacacagatgcaaacacacacatgcacacacacacatgcacacaaacacacacatgtacacacacacacatgcacacacacatgaagcatgcaattttggaggtgctgaatatgttatgttttggatatgcctattatcttgattttaatgatagtttcatgggtatatgtatatgtcaaaactcaccaaatagtatatattaagtgtgtggagttttttgtttatcaatcatacaacacttttagcttcaccaatcacatttcctgagatgtgtaaaaacaaaaacctatttccccccccacccccaaaacagagtaattttcacatggaaacaatagcataagcatgcactacattaacagatttttgcatgctgattttttttttttttttagatggagtctcgctctgttgcctaggctggagtatactggcatgatctcgcctcactgcaagctctgcctcccaggttcacgtcattctcctgcctcagcctcccgagtagctgggactacaggagcgtgtcaccacgcccggctaatttttttttgtagttttagtggagactgggtttcaccatgttaaccaggaagatttttgcatgctgaatatttataaactttattgtatgcagttttcttgccaatcctctattcctccctacacaaatcaaaaatgtccaatatattttacataaaagaaatctaaaatcaaaactgagagataaagatctagtgaagaaatctgtcaccttaaaaataaacatgattattggtggcaatagtaattcagaatcacttgcaaagttaaaattcggagctaaaccgtgtacattttgtaagcaaatataacagtaaactctttaatttgaacattgaactagaaatctatctcccaaaaaattacaattttgtgaaacaggaaccaaaactatatactaagataacagtaattcatcaggtacttttttggatattatttactatacacatttttgttctaccttacaaaagttaataatctttcattaacattaaatagaattaatcaattcaacaatggtgtaatatttaattttaattttgtaggtcattgatctgatttcatttgtaatcagttttagcataagtctgcattaagagaccagaggagaaaaaaaaatgaaagaaaaataaaatctaaaagtgcagaaaaataatatcttagtaagaaaagaacattttcctggcactgtttgaaacaaggccatgtaataggctttaaccagagttaccctaaaccctgcctgcccttccttccccagccatttatcagctcaatcaaaattcttgtggcaatgtagcatcaactaaccccatcaatacaaccatatctttggtcatcgtcgtatttgcttcccctctgggtagccatcctctgtactccacccccgattgttcattagttttctcttcctaccagcttgatacctatttctcttgctgaaacacttgtttgtttttactttgtttgtttaaagatcaacaaaacttaaacatttttaaaggcttttaaataactaaaaactaactgtatttccattgtatcatctctcttgcatcctatactatgtccattatcttttaagttacattactaccttgctaacctccagaaaatatgcttactctagaaaatcttggctttaccatgtttcacctgtttctcctctggttttcaaccaacattttaatgccccatttattatacttagtgcccaaccgaatggaggcttttgtttgtttttgtttttgttttctttctattccaaattatctccagcatcctaattagtctgattcttcatgttgatattccaactgtttagtattactgaaagtatgatttccgtcaaaaaactataattggtccactatgagataagcacagaaattgaaagtaagacattagaaaccttaaaaccacaggatccctgcatataataatttgccaaattcattggtttatttttagataaaaacactgctgtgaaaaaaatttgaacttaaggaaaaatctccttttcctctttctagagaaacactgctctagacgagttctttacctcacattttcagatactttaattcacttctacttcaaactgaagtttctccatacctcatgaatttactagtagttttaaccttcggcatgtgcaatattacattgagatatcctattatttgaccataatcttctacattttttaataattatataactatacctgtattttatgtaaagatatctattccccgaacctttattttttttcataaggactttttccggtttgacctgaacctttttatttaaactaagtggccacccttacttcctcaattgtttgagattttccttttttaatcccaacaattttttttttttttttttttttttttttttggagatcttctctacttcctcgtctccttggaaatttttttcttacagtgaatctacaagtgaaaagttggacagtattgagagaataagaaaatttactaaatgatgctgttcacaattttatggtttctaatctgactagacgctgaactacccaaggaaattatttctctcttttttttttttttggagacagagttgctctgtcacccaggctgaagtgcagtgacgcaatctcagctcactgcagcctccacctcccaggctcaagcaattctcttgtctcagcctcccaggtagctgggattacacccatgcgtcaccacgcccagctaattttttgtatttttagtagagacagggtttcaccatgttgaccaggctggtcttgaactcctgacctggtgatctgcttgccttggcgtaccaaagtgctgagattacaggcgtgagccaccaagcccggtctatttctcccttttctatcattgctctccttactcttcttaaacttgctgcccttcttccatctaagtcaaagtttatattgtcactttgactttacaaacaaaatatagaaaattcatcttatctttgaaaaatggactgctaacgtagctggattaacaaatactctttccttttatcccttatttgcaatggatatgttggtacaaattatttctaagcccaatacttatattcctgttcttaattttatctacttatctccagaaattcatctgatagctttctcttcatttttgaaacacagtctattcttgacttttaaaaataatgcaacaggcagggtgcagtggctcacacctataatcccaacactttgggaggccaaggtgggtggatcacgtgaagtccggagttcaagaccagcctggccaacatggtgaaagcctatctctactaaaaacacaaaaattagccaggcatggtggcacgtgcctgaaatcccagctacttgggaggctgaggcaggagtattgcttgaatctgggaggcagaggttgcagtgagcagagactgtgccattgcactccagcctgggcaacaagagcaaaactctgtctcaaaaataaaataaaataaaataaaataaataaaataaaataaaataaaataaaataaaatatagtaaaaataatgaaacaaaggaacaaaaacaaaaagcatcaatgtcatcatacacatggttattcctttggcaactaaatagctaccattttctattaaatccataaattaatgtatgagaaaatgtatgatgctaaatagttctatcttactaagatttacctactttgtctatatatatagataagtagatgaatgttatcgataaaattacatagaaacttgtatgcatctaataaattcgtatgtatctaataatctaggttaaaatagataaagaaaaactgatacaattttaaaaaaggaaaattcactatcattttaagagatatagtataaattgcttctgttcaaaactggtaaatcaaccagactctataataagaatgtagaagactagctaggtgattaaacagaaataaatggaataccataatcaacaatactttatagtgattttgttgctaattacttttatttaaaaagtttatggaaactgcctaaaaagtgatcagaaattgaatctcaaattttaaacattgatgtaatgtaggtcatatattctaaaactccaataaaattaagttagatgttagtttaaacagtgagaaaaaaaacccttacatgtagaaattatgaaaaaaaccccgacacttctaaacatcttatgggccaaagttattgtaacaataatcagaaaacacataaaactgaataaaatataaatattacatatcaaaactaacgaacacctaaataaaacattatttaactttaattgattatattctaaaaaggaaagactgaaagtgaacgagccaataaccaaacttaagactcaagaacttgaaaaattaacataatacagaatacaaacaaaactgtatattatcatcagaaattatttatatataataaatctgaaatagaagaaaaagcaaaagataatttttgaagagataaaactgacaaatctttagtgagactaatacgggaaaaaaacacataaatacacattgttaagaatacaggcttggtgtggttgctcacacctatactcccagcattttgggaagccaaggcgggaggatcacttgaagcatggagttccagactagcctctgaaacatagagagaccctgtctctacaataataattataaaaaattagctaggcatggtggcacatgcctatagtcccagctactcaggaggcttatatgagcccagagttcaaggctgcaactagccatgattgtggcattgcactgcagactgcgtgacagagcaagagtccatctctacaaaaaaataataataataataacataaatgcaggaagaaagtgcagagactagaaacatgagtatcaaagttggacacataaaaatatgtatacatttaattatataaatataaaaattacaatatatatcatacaacacatctctatttgcatctctatctctatgtccttatatttatagctaaaatataattacacatacctatagtttattcttattatttacagtatttctgttttataagtccccacagacactgaattagccaatagtgaactcagacaaaaatacagttagatttgtgaccctttgttcacattattttgttaatccatcaacacgcacctttgttttatatgtctccatttaaagacaacttatttaatgtattttgttgattcattaacattgaactcatagccaacagcactgcaactcatgcctagacacagcttatctaacacacataattttaccttaagtctcattaccaccttttgcacttaggaacattacatagcactttaagcactacatttgggggccattttaaacagtgaaattttcaacaaaaagcacaagaatgtgaaaaacacagctctaaataaagcacagaaaggacatttgcttgcagtaagtgagctgaaacagaaaggcaaagtgtcactgtgtttgatctcacttgggaatgtatgcattgtgcaacttgtatttttggctctctgcagatatccatgaatgaccatgaaagtacagcaagtgattttcaagctgcaaacaaattttagcaagtaagtgcatttgccaataagcaatacatgaatatgagaatcaaaagcatatataccataatatgccataagtttatacaccataaaatatatctacatatttatatctatatctatatcaatctatatgtatatcataaaaacaacaattatcaacaatgcaatgaatttaagaatacattggaaatgggaatagaatagatgaattcatagaatagtcctattgataaacaactctaatatagtacaaattattctaccgtatgaaaaaaagaatactagttcaatcattttctgaagctagagtaacttaaatacaaaaatgtgacaaggatagtcttagaatgtagaacacacttataaacatagatttttgtgcagtattaaatagaaaatagttggtcaatacaaacaaaaaggccaagtgtggtggcttacacttgtaatcccaaaatgttgagaggccaagacaggaagatcacttgaagccaggagtgggagaccagccggggcaacatagtgagacccccatctctaatatatatatatataaaagctgggcatggtggcacatgcctatagtcccagctactctggagactaagagaggaagatccctttagcccaggagttcatggcttcagtgagctatgatcgtgttactgcactccaccgtggcccacagagtgaaaccttgtctctaaaacaaaatccaaacaccaaaacccaaaataaagacatttatttattaaattttatgtagcatcagaatcttcagctaagctaggcatgcttcacaatgtaacaccctttaaagcaagaagaatcttgaatctacttctcaactattttgcatatatcttctccaattcttttcacattccccgttatgtcagttcctattcacctcttttttagtcatctccatttatttttagcagctcatattatcacctagacaaaaggtcaaagactttatcagcccctgttgtgttctgtttgggtttttgtttgtaatgtcctgtctattttccttttaaaatggcaaaatgataattctatattataaggcataataaccttgagattgcccaattgttgttgagtggataatttaaaaataattgtagagttttcgtcaagaaagtgaaaataaacacaagccagcatcagttccatttaaagcaatactacatagataagccacttcacctttttaatatagcattgacattggcaacaaatgttaaggatgtcatatacaccatgaatttgaataaattaaatgcagaaactagttgacaagtctattttttcataaaattaatgttaaaaattgagtttaagcttgagtgtcctactgtattattattattacataacaaatgagttagttatattgaaaatgtaggaaaagcaaacttttcccaacccccctcgcatcaaagatggtgtctctcaactgcattagaaaatgctgattcaggtaatcccaccctaaccccagatgctgtctaatagtgtattaggaaacccctagtagcttggaaagtattaacctagtatttctgtttatattgccttgattattagtgtaattaaacatttgatttcatcttttgtaatacataggtgtatgtctcttaaaaatattttaccaattgcttacttgattattagtgtaattgaacatttgatttcatcttttgtgatacataggtgtatgtctcttaaaaatattttagcaattgcttattttttcttgtagatttttcttctctgaatcttttttattgaaaattttattcctgagtgaatctcataagttgcaaacattgaatgaagtaggatttttaactttattttgttcacatgtgttgtcaagtgtttaaatgccatcaataaatttgtatatattaaattccttatacgatttgttaccacagtccttattatagctagtttttcagtttgttccattatatcaccatttaattgctttataattaatagcatttttgaaagagtcttcataagtcttcagtgattttcttaaattatttttattttgcagttaaataattttccaaacaaatgaactaatttaaagtgataatttttactgttattactttaatttacataataatttggcaagaaatgaattccagtagatatagcaatgcattgtattccctctgctgtagtggaaagcgccagtgttacaactagaaataaaaatctcaggtatggtagtgtagaaaaattgaaggtctggtagctgtctcatatgaatccaagtagttctgttcagtgctggaaatagcttacgatgtcatggttccaggttctctcttgttactctgtcatgttcagcaaaccatccttgcagctgtttttgctttcatcatcccattctcattgcaggcaaatggaagaagaaagaggagagtggtggtgtgtgctttccctttaatggcagaacccaacagtcgtacacaccacttctaccctcttaagatgggtcagaatccaggcccaattccatgtatacatggaagagaggcttattaaagtagccttcagttgctggacagagttccatccaaaactacagttaataggtaagtcgagaacttacattaagtgataaatggcagtctctgccaaggaaaatattcttatccatgctcatggataagaagaatcaatatcatgaaaatggccatactgccaaaagtaatttatagattcaatgctattcccatcaagctaccattgactttcttcacagaattagaaaaaactactttaaatttcatatggaaccaaaaaagagcctgcatagccaagacaatcctcagcaaaaagaacaaagctggaggcagcatgctacctgacttcaaactacactacaaagctacagtaaccaaaacagcttggtgctggtaccaaaacagatacatagaccaagggaacagaacagaggcctaagaaataacaccacacatctacaaccattgaaactttgactaaccagacaaaaacaagccatggggaaaggattccctatttaatacatgctgatggaaaaactagctagccgtctgcagaaaactgaaactggaccttatacaaaaattaacttacatcttatacaaaaattaactcaagatagatcaaagatttaagtgtaagacctaaaaccaaaaaaccctagaagaaaacctaggcaataccattcaggacataggcattgccaaaaaccttatgatgaaaataccaaaaggaatggcaacaaaagccaaaattgacaaatgggatctaattaaactaaagagcttctgcacagcaaaagaaactaccatcagagtgaacaggcaacctacagaatgggagaaaaattttgaaatctatctttctgacaaagggctaatatccagaatctataaggaacttaaacaaatttacaagaaaaaaacaaacaactccatcagaaattgggcaaaggatatgaacagacacatctcaaaagaagacatttatgcagccaccaaacacatgagaaaaagctcatcatcactggtcattagagaaatgcaaatcaaaaccacaatgagacaccatctcacatcagttagaatggcgatcattaaaaagtcaggaaacaacagattctggagagaatgtggagaaatagaaatggttttacactgttggtgggagtgtaaattagttcaaccattgtggaagacagtgtggtgattcctcaaaaatctagaactagaaataacatttgaccctgaaatcacattactgggtatatacccaaagattataaatcattctactataaagacacatgcacacgtatctttattgcagcactattcacaatagcaaagatttagaaccaacccaagtgcccatcaatgatagactggactaagaaaatgtggcatatgtacaccatgggatactatgcagccataaaaagaatgagtttatgtcctttgcagggacatggatgaagctggaaaccatcattctcagcaaactaacacaggaacagaaaaccaaacaccgcatgttgtcactcataagtgggagttgaacaatgagaatatatgggcacagggaggggaacatcacacactggggcctgtctgggggttgggggcaatggaaaggatagcattaggtgaaatacgtaatgtagatggtgggttgatgggtgcagaaaaccaccatggcacatgtacacctatgtaacaaatctgcatgttctgcacatgtatcttagaacttaagcataacaaaaaaatatatttctgggcagaggaaaaatactttgaaatttacatttaatccagtaaaatttcagtgcattaaattaaagcttgtaatataataatgataataacagacagcatttaaagagcacctcttgtggataatcaagttattgagaaattatgtgtgttatctctgggataaagattgctgcatccttatattcttgtgtataaacagaccctgtatatgtaaaaaaaggaaagagaaaagtatttttaaatgcactaatttgtaattaccacataaactattactcatggaagattagttatttgttgtcagtactttttttttccctttcaaaaatgtattcagattttactatggcctaatatgtaataaatgtatatttcctgtgtgtcccattggggctttcaaagaaaacatatctcttttagaaaacatttttcacatagagatattatgcatcatattcaaaacctttgtagatatctttcttgaattattttatgagtcaaagtttatatttcagaaatatttctttattttttccagtaaaggagaaatcattaataaagaggcaaatttattaacactattacctgaattttttagaatgataacaaataaatttagtaaatattgctgatttattagcagataaagtcattctgctccaagagcatgacagctaaacttccactagctcatttatactctgtggaaatatgatttactgccatatgagagaaattaaattctattattttaattctgtattttgtatcataaaagagaaaccagatatggaatacagaatatgcatatatggaataaaacaatggggaataaataagatttagttcaagaaataaagagatcatgtattcaaacacaccagtgagttctttaaaaaggaaatcttttatgttctaattaaagtagcaaacttcacaacttgagtttttcagctcatttgtttcctgacttctttattccaagttaaatactcctaaggtgggtcatataattcagtgacctttaaagtaaaattgaaatatttaattttactacttttctttatctctttttctctcaccacatgcagcttataaatgccaatagaattaattgcctaattataaggaataaaaacattgccttttgaaggatttcaaatttatgtatcctgctgtggagattttgcttgactacctgacctatacagtctgtgcttcttaaggaaagaaaataagtggactactttcgaacacattttgaacttggtaatgaatgctacaatactgctctgctctataatcttaggttattttatattttaagggcttcacctggagccattttactgttaaccataactattatatatactctttaataagctccattatatttttttttacttttttccttatacaatttagtaatatggcagaaaagcaggtaataaggaaaatactaatcatcattagtttacaacacattgacacacattttccagcaagaaaattcgattaacaggtagcacgaaaaaaagctgcctacctggataactcatataacactttacactatatctctcagaaaaaaattaccatattcaatatgcttcatatttattttcttaataaccacatttttaataacctcattttctctgggaattttgggtttcaggtacatatagcatcttcatgccaattttataaggtcataccttaatcactagttgcaaaagtagggatataaaggcaagaattctagattagaaagtgatatatgtgattttacaggaagacagaagaaagggagaatttgtgaatactatgtgaaagaagaataaacccatgagccaaacttaatttggatattaaagctgattatatcacacatacaccaagagagtatgaaaagatttatttctcacataatgagactttctggacagatcatggcaagctcaaaaacagttctgaaaatggcctaagataatatggagggatgagtagcttgcctgttattttacttggagttgggagttgtgcatctgggatgaagtttacatggtttgaactttccactggcactgaggtaaagatctaagatatataactggcttgccaagatgtagaacaaaacagaagggcgggtggtaaagcataaaaactattaacaataaggcaataaaaatcaatccagactctttattataactcactccaatgtttgactgaggagtaaaatgtgctatgatttatttaattgcatttgaagttgttatagtaagccattatggttacctatgaggctcacagcatgagaacggtaaggaaataaaacttccattgaataccttcgtcagcagatgtgatggttaattttatttgtcaatttaattggttgatgggatgttccagtgtttgcttaaacactattctgggtgtttccatgagggtatttgggatgcaattaacatttatatcagtagactgagtagagcagattttctgccgtattgtagttggaacttacctaatcagttggaaatctaaataaaacaaaaagtctgaatcaccctaaagtaagagagaatcttgctacctgacactttttgaactgtgacattggcttcttttcctgacttcagactcaaactgaaagatcagctttttctgatttttaagcctgccagcctttggactggaactacttcatttgttctcctgagtctccagttttgtgacttgccctgtaaaccttgggacctgctagcctccatgaacttccatgatattactaatttccttaataaatctcattcattctctctctctctctctctccctctcttagttctgttttttttgttgttttgatttgttttgttttgttttttcctggaaaactctaactagtacatgagcccagcattgtgtattttgtgaagtaaaatgtgttccttgctcacaattgctcacaatcaattgctcactattattaatgtgtagaaccgtgaaggggtaaggaataatttggtaaagatttgtattgtggcatcattatgtaaaaagacttgcaaccctggttatatagtgggtacttgtaattcacaaaatttcagagttattttttccaaacaggaggatgttggacatgaaaattttgttgctagcattggcctgcccaaatggccagaccattgtccacagataaatattccgcaaaattatgcagatatggctgattcttggacagagcatttattgttaagattactgcatgatgtttggccagttgcactgagccttgggtctcattcttgatcagggacattctgttgaagcaacagaaagtggctgttatgcagtgggctctattatgtgtaatggcagtgcttccatccatcatggtatattaatggactcacagttccacatggctggggaggtctcacaatcacggtggaaatcaaaggaggagcaaaggcacgtcttacatggtggcaggcaagagagagtgtgcaggggagctgcactttataaaatgatcagatctagtgagacttattcactatcacaagaataccatgggaaaaacccacctccatgattcaattatctcccaccagtacccccatgaaacgtggggattatgggaactacaattcaagaaaagaagtggatggggacacagcctaaccatatcacatgggtagtctggaacctctaaaagacataagaagaggttgccaaagcttctacagtgaacaatctttggggggcactaacttaagtctctgttgtattgcaatactgatagattctagagtcttttgttgtagggtgacccattcagggtaagtcaatttgtgagcaacaacataaatgagcttaaataaatgtaaataaggaatatgtttctttcagaatccaaaaggtcgaaaagatgttgaatttgttttaacattgtgggtgatgacagaatgaacaactgtttctttataatgtcaggaacggagcaccctctagttaaatgatagtgagaaattttactgaggtagtgaggccttttgctttgtgtgagtaagtagtccactaattttgatgagctctgttgtgactgtttggttgtcctgaatgaatgtgtaaatagactctcctaggaggatgacatcaatataatgtcatacatatgttcctagaaaaattttaatgtgattaaggtcttacctacaaaggctgtgtgcaacagtaaatctgttgcgatgcccctgggttgctgcataaggatgtattgtctttttgaaggtgaagaaaaactgcagctaagaagctgttgaaataggcaatgaaaggaatttactagctaaatctgtgactgcaaagtacttacccgtttctgattggattgaatggagtcagtaatttaagtaatatcgggtatagaagacttaatgggtgagattatgacattaaggttgcaataatccatcattaagtgttattcattatttccagttttaagaatagaccaaatacagttattaaataaagagaaactgtgggggataattacctcttctccaaatagttcttgtataatgtgttttgatcttcgaaggctctgtttaactttgtatgtggccacattaagtattttgaccagaggggaaaacccatgaggtccaattctgtgaagctgattgtaagtgccaaacatttgattttattttaatgtattatttatggggtcacatcatccatgcacactatggaatattttagtgcaaagcaggagcttataagtaggtctgtctcattctcttgatattggttgttggcaaatgcagatccaaattcaggcctgcatgtgcgaaccctcactctgattcctctccctaactataagaaaagtcaagccgctggctgcacccccatcccaacctgcgctatctcaaactgttttcttcctgcttaagaactagccatgttcatcccacaaagcctcattatgcgagtaataaactgcttcataccctcttgatgtctgtgtatggtattatcagcttcgacaacttgactaaatgtttggttgggtgtacattcttattgcacagatcaaccacaaaaagaaaccattttcgtctgatgtagtcatgaaaatttttacagaataatttaaatttgaaggagactgacaggtaaaaggatttgcataagctcaaatgagaaatgggaaaattcagtgcaggttatgtggaccatcatatatactggtttgtcaagttgaaaaatatttaatgtgcactagattctggtacattaattgatgttggagtatatttttacttattcattgttttctcatgtatttcttttctttgtgtttctctcctttcccatagacaacaaatagggttattctatgttcattacttcaaggatgatcacagaaatattttttcccctggagctctaagagtagatatccttaaggaaataaacaagtttaaacaaatggtttgctaacatatggtttgattaggtttggccttcccttccccaaataaaaagaaaagaaacataatatatagatacagatatagaagtatagatatttctagggcaggagaagagaacagaaggaatgacaagtttaaatttatcgaatcatatacggaggaaaaatatatgctgcttctagtcttggcttgagtgaaatggtagtactcaaaagaaatttgcaaaattggagagaagaagaaccctgaacagttcaggaagtctaataaagaaaggctgtatattcgatcgaagcagacacatatttaaacaaacttcagtgactctcatgctttagtgagacattggacctgcagttcacacactaaaatgaggcacggagattgccactggaccagaagggtacatcttcttgggaatcagggttatcttagcagcaatatacatagactaataactgagactcaagaagaaaaatcgaaatatctttgttgaaaaatgcaatcagatatctgagactgtgggcttgtccacattgatgccttggcagtaaatacgccacctagaactaattccaactcaaggacagatgctggcaacatggaattgcaaacctactccgagtgttctgacactcacatagaataaaaacttgagttaggaaaaaatagagaaaattatattgtttcactttttaaaaattactatgtcaattaaaatttatatactatatttagatgaaataaggttgacagtaatgtggaaccctagctatgaaggactcatatcagattacagcaattagtctttattttctacagaagattttgagtttgggattttgttataaaatcagtccttaaggaaaattaatctagttttttgcactttgcaataagaggacatttagaaaatataaattacagttaatttctctaatgcagttatgagataaaaattgccccagattatgttgttggatacacatgatagacaggaacataaaaacaaaatgacaaaatattaaaacttgattataaatttactataaaggccaataagaagaaaggaagtacttgaagttgtagttctggtgactggaaagacagaaccaatggattacagaatcaaatcaagaggtttgattgagaaaacaagacaatgccaatttggattatacaagtttctatgttatctagaaggcaaactgaaaagtagttgaaaatatacaaatagaatgcacaagttatcttgagatggatttaggcttttctaatagagattaagaaaggcccaataagcagtgcatcaaaatgcttcaaacataaaaagatgccaatttggaaaggttttaccttctcatttgtaggcagcatattaatggcaaataaatagaaagtaagggggagaaaaatggaagcaagatgcttggaaggaaaagggattaaagtatatgaacagaatgctctttgaaaaccaagcaggaatccaggcgtgaggaaaccatttatcacatacattaatattggtattgtatgatttttcattgctaaatttataatactttagttcatgatactctaatttgtagtagaatgtgttaaatacactgaataagagaacaccttaatagtgttctaaggggtcagaacacgcacaatcagacattagtatacattcgaacttcttcatattttctattcatcttgtttttcctatttggggccttaaattctgctttccaggctgtcttttcttgatcaatttcttcattgcactgtaagaaaatactattaaaagctaagcattaataggccttaacttttgaaaacacttaatatttagagacccaagcatgtcgttcagaaaaaagaaaacaagttacaaatgcaaagcattgcaggaatatctatttttctgagtaactcaagtacctctataccttgtttataaattaaaataatgtttcactgaactgtactttgctgttttagaaatattttctcgaagaaattgaaaaataactctgacctttactgcgtagacctgtgggaactgaggctcacagaatcagcacaacatattgttgtggttgctggcttttatcatggctaatgaacagtccttgtcttttaaggaagggtcctgtgttttctgtcagtgtatgttgtatacgaaacggtggtaggtgagcttgctagcttgaaagtcttgtcaaatcactgacttcaggcttctaacttaaccactacactaaaggtcttacttttgatgtgagaatgttggtaagacataaaaattaattaatatatatttagtataatatatagtatactaatattaaatatctatatatttaatatatatttagtatactatatataatatataatatatatatttagtatatacggatatgtgtatatttaatatatatacaattaaaggcagggtcttgctttgccatccaggctggaatgcagtggtgtcaacctatctccttttagccttgaactcctgtgttccagcaatactcccaactcagcctgctgaacatgtgcataccaccacatccagctactttctaaaagttttgattaataaaaatattttaacattaggacatccaactttcgaagtagttcaataagcattttattttgatacccactccaaattaaattctatatgatggtttagattatgcattaatgagcagatcactctttatccataaaatcatcaatataattgaaatcagttttatcacatataacccatagaaaaattgaatgtcaatgttttaataaaagcagaatgtaaccaatgacttcagccactttctattttccggtaagtgctaaaaagaaaattgtatgaattttaagagccatataactttttaaaaaacatttgtaatgttattcaaatgcccaccaaggcttcctgcatgcttaatctactgacttctaaagaggttttccagaattattaagtacaatgatctgaataaaaatttagaagataaaatgtataaccaaatataatctctttgtcatatttattttagaaacataataaatgtggggttttctgcaaaaaatgtaccttattagattgtgataaatggaaatcagatgtaaattatttttttctgttgtgttagttgtacctgaatccagctgtacacatctgctcattgacataatctccgaggaagttttggtgaatcaggttagttcctaagattaacacaacaggaaacggccatcacctcttaattaaaagtttgcactgggcccggcgcggtggctcacgcctgtaatcccagcactttaggaggcccaggtgggcagatcgtgaggtcaggagatggagaccatcctggctaacacggtgaaaccctgtctctactaaaaatacaaaaaattagccgggcgtggtggcgggcgcctgtagtcccagctactcgggaggctgaggcaggagcatagtgtgaacccaggaggcggagcttgcagtgagccgagatcgcaccactgcactccagcctgggcaacagagcaagactccgtctcaaaaaaaaaagaaaatgtttgcgattagttgaatttacaaattctataaaactaagatgtagggaagatatcttctcatgtatatgactaaaattatcatgttcctaactgcaatatggtatccggagattaaacctaggacagaacaggaacaatatgaaaaaaaattgcaaattgtaaagaaatctgtctaacaaattgtagataaatctgtctaattaatagaactagtctaatgcttatttagttaagatttttcaatagtgtctcatatggaaatattaatattagagaaaattcagtgaagaatatacaaaaattatctgtattattttaattttcatgtaattatcttccaatttttaaaaataccaagtgagataattttgttttttcagtagtgaccatcacttctgtatgtctctactatactaatcctcttcatccctactcagttttctttgctcttctactaattacattttgaattccagcatagttttatcgattttctcattagtcctataattctaaaatcaaaatattccatgaaagaggaaaaggagcttcaaaagggtgaagcctgataaagcacactatatatctaagctcctgaaaagagtaagcacatgtttttttattttttattgtctaatacagttttcattatctgcatttacctttttatataatttcaacttttattttagattcagggggtacatatgcaggtttgttacataagtatattccatgatgctgaggtttggggtataattgatccagtcactgaggtactgagcatagtacccaatagtttttcaacccttgccttcattcctcccacttcccttagtagtccccagtatccatcatcgacgtctttatgtccatgactgccaaatatttagttcccactgctaaataagaatatgcaggccaggcgtggtggctcgcgcctgtaatcccagcactttgggaggccgaggtggtggatcacgaggtcaagagatcgagaccatcctggccaatatggtgaaaccctgtctctactaaaaatacaaaaattagcggggcatggtggcaggcgtctgtagtcccagctactcgggaggctgaggcaggagaatcacttgacccaggaggaggagggtgcagtgagccgagatcacgccactgcactgcagcctggtgacagagcgacactccatctaaaaataaaaagtaaaaaataaaaaaaacagaatatgcagtatttggttttctgttcccttgttaacttgcttagatgatggcctccagcagcatccatgttgctgcaaagaacatgattttattattttttgtgtctgcattgtattctgtggcatgtatgtatcacattttctttattcagtccaccactgatgggcacctaggttgattccatgtctttgccattgtgaatagtgctgcaacaaatataagcgtgcatgtatctttttgatagagcaatttattttcttttgaatatttatccaataatgggagcagcagacatcagccctgggaaataatttatgattaattcctcaaaagcaattgtaacaacaactacaaatgacaagtaagacctaattaaactaaagagcttctggctgagcatggtggttcacaccctgtaatcccagcacttcgggagtccaaggcgggcagatgacttgaggtcaggagtttgagaccagcctggccaacatggtgaaactctgtctctactgaaaaatacaaaaattatccaggcgtggtgatgtgcaactgcagtccagctacttgggagtctgaggcatgagaatctcctgaacgtgtgagccgagatcctgctattgcactccagcctgggggacagagtgagacttcatcacaaaacaaaacaaaacaaaacaaaacaaaacaaaacaaaaagctgcagttcagcaaaagaaactatcaaaagagtaaacaatccacagaatggggattcataaactatacatctgacaaaggtctgaatggatggggaacttaattcaacaagcaggaaatgaagaaccccattaaaaagtaggcaaaagacatgaagagacacttctagaaagaagacgtgcaagcagccaacaaacatgaaaaaatgctcatcatcactaatcatcagagaaatgaaaatctaaactatgatgagataccatctcacaccagtcagaatggctattattaaaaagacaaaatttagcaaatgcccagcaaggctgtggagaatagggattgcttatacactggaacatactgaatttatagattaattttaggagatttgacatttttaccatgtttattctttcaatagatgattgtgatatatgttttcatttacacatcttatcttaattattttatcagtgttatgtcactttccgcgtactgattctgtgtattttgtcaagaacttttactgaattaattgatagaattgtgattatttcttgtttaggctcttaatatgatttgtcactttgattgatttgaaagtattgaaacagtcttgcactcacaggataaatatcacttcaatagtacattgctgtcatattttggatattttgttgtggatttttatgtctattacatgagggcaattggtctacatttttattattatgagttatatgtgtttgttttttatatgagagcaaccctggcctcctaaaataagttgagaaatatgtccacctcttttatgtttcagaagagctttgtgtttatttttctctttttttttcttttctttttttttttttttttctgagacagaggcttgctctgtccaccaggctggaatacagtggcacaatttcgactcacagcaacctccgcctcctgggttcaggtgattctcctgactcagcctcccaaatagctgggattacaggtgcatgccaccatgcccagctactttttgtatttttagcagagacacagtttcaccgtgttggccaggctggtcttgaactcatgacctcaagtgattcacccacctcgccctcccaaagtgctaggattacaggcatgagccactgtgccccacctgtgttcatttgtgtcccttgtgctttaaaaggttggtataactcatcataaaaccagttgaaactagatatttaatcattagaaaatgttaaagtacaaattcaagcttttaaagtgtaggtatacacaagttaactttttcgttttggttaaattttgacattggtttgacaatgtggttttctaggaattggtctattccgtctaagttgccttatttaggtcctcaattatagcattaccttattatcattttattactggttggatttgtattaatatcttttgtttctttcctgctactgtcactgcatgtgtcccttttttatctttgtcattagtgccagagtttaccagttttcttgatcttttcaaggaaccacttttagtatcactgattttctgttgattttcagttttacatttcattaatttctgcctctatatttatttcttttcctctgcatatgtgatgctattttcttctttttgtgtgtgggtcttttttagtttcttcaaattgaagtttaggtaattgatttaagacttcttttctaagatacagattcaacagtataaattccccttcaagaactgcttcagttgtgtcacagaaacttaatgtacttcattgtattttgagtcagtttaaaataatttataatttccttcaggccatattttcttttaatactttcctagattatttagaattgtagtgtttaatttccaagtgtttgtacatttttctgtaatatttattgtattaatttctagttgaatggccagagtacatactttacatgcttttaagtattttaaatttaagatctattaaaatgtttatttgttatttgttatattcatgtatatatttatgtatggtatatctatgtacggtatgtatgtatgcatccatgtttcagtttacttataattaatagtagggtccattttggttaacgtttatgtgtatctgaaaaaaatttgtatctactttttttttaaaaaaagtgttctatatatcagttggatttagtttgacaaagttgttcaattttctcatcttctcactgattattttgtccattagttatttctaaaattctggatttttcatgcctattttcagttctaacatttttgcttcatataatttatgacaccctactacttatgtaggattgctatgtatcttttgtaaacagacaattttacagttatctcatgtctctctttattcctagtacttttctttgctctgaattctactttggtattagtatcaccactatagacattttttgaaaccaggttttatatagtgtatctccatttctttaattttaattatttttttttgaaatgaatttctggtagacagtatataattgtgacttttttatcgggtctgttgatctcaatgttttcttagtagtatcaaaatcactgaaatgtaatgcaattatatacatgtttgaactcatgtctaccatattattatttgttattctgtcacttttctctgttttttaattctcaatttatccttttttgagattatttgaacatattttattatccattttttatttcgtctatttttttctttttatttcacctatattttagtttttatttttagtggtttttctgaaaattaaaatatacacacctaaggtttacagtctggttagaatcaatattttatcactttatttaggaaatatagaaactatcaccatattggtgtgcctacttctcttcttcatgatattcatgatgtagttatctatttacacattgactctacatatattgaaaacactatcagacaagtttataattctactttcaactataaagcatatcttaagaacttaagagaggaagaatagtcaattatgtttattcagataactattatttatgattttttttcttaattctgatgttctttatttccttctaatatcattcccttcctgtctggagatcattccatagaatttttttttggagcaggactgctggagaaaaattatcttagtttctttttactataagatgtctatattctacattcattcctaaaatatattgttggtggatatcaatttctgggttgacagttctttcaatatttaagcagtgttccatttctgcttgcttccgtagttcctgagatatgctcagtatttaaaattattgccctcctaaagcaatgtatcattgtgttctggctgttttcaagactttttcctttgtctttaagtttgatttttatatttctgagaatggatttctttttgtgcttaaattgtttggggataatggagtttcttgattctttagttacgtgtatttcagtttatctgggaattttcgtccaccatttattcaaataatatttgtgcatgtcacactctcctttttatttctatgattctgatgacatgaatattagacattttgtaattgtcacacaggttcttgacgttttgccaattttttttcaatcttttgtcctctattattcaaattgatagtttcagtttgtttaaatgtattttcaaattcactgactcatctttattctgctactcaaaccatttgaatctctaatttttgttactgcatttttcagttgtctttgttttttggtggttttgtcttaataacttttatttctttccttagtctttctaggtgtccatttatttcaagaagaactgcccttactccttgggacatttgagtaataggttttaaactaatttctggtaagtctagtatttgttacatctaggctttatatctcttttgttttgtttttggggccttttttgtttgtttgtttgagacagagtcttgccctgttgcccaggctggagtgcggtggcaccatcttggctcactgcaagctccacctctcaggttcacgcctttctcctgcctcagcctcctgagtagctgggactgcaggcgcccaccaccactcccagctaaatttttttttgtatttttagtagagacggggtttcaccatgttagccaggatggtctcaatctcctgacctcataatccacccacctcggcctgccaaagtgctggaattacaggcgtgagctaccatgccgggctatgctttatatcttattgatttcttctatcatgcaagttgacactttcctggttctttatatgccagattaatttggtttatatcctcagcatatttttatgaggctctgattctttctaaaattctatggagatttttattaaatatatttttaagcaggtatattagattcctgatgctgtaacaagttaccaaacacttagggccttaaaacaatgcaaatttattatagtactttttggtcagaattcaaaattgggctttacagggtcaaaatcaagatgtctgcagagctgtgggtttttctttctttctttctttttttttttttttgaaagatcctagtcttttccagcttctaaagattgttcatactccttggcttgtggcccccttccagcagtgccatcgttctgacaacttttccgtggtctcatctccttctctaactctgtgtctcctgccttactcttttttttcctcttttattcttgttttttaactcttatttttttgttcaggggtatgtgcacaagtttgttacatagataaacttgtgtcatgagggtttgttgtacaaatttttcatcaccaaggtattaagcatagtacccattagttctttttcataatcctctctcttttcccatccttcaccctccaataggccccaatatgtgttgctcccctatatgtatccatatgttctcatcattcagttcccacttttaagtgaaaacatgtggtgtttggttttctattaccacattattttgccaaggataatggccttcagttccatggtatttctgtctttacgtctttgaggaattgccatactgtcttccacaatggttgaactaatttacacccctgccaacaatgtataagtgctcctttttctccacaacctcaccagcatctgttactttttgacattttaataatagctcttctgactggtgtgagatggtatctcattgtgtttttgatttgcatttctttaatgatcagtgatgttgagctttttttcatgtttgttggctacatgaatatcttcttttaaaaagtgtctgttcatatcctttgcccatttttaaaacaggttgtttttttttcttgtaaatttgtttcagtttcttatagatgctgaatattagatctttgttagatgcatagtttgaaaaaaatttctcccattctgtaggttgtttcttcttttgatagtttgttttgctatgcagaagctctttagtttaattagatccaaattgtcaatttttgcttttgctgcaattgctttcagcatttgtgtcataatatttttgtccgtggctatgtccagaatggtattgcctaggttgtcttccagggtttttatactttgggttttacatttaagtctttaatccatcttgagttaatttttgtatatggtgtaaggaagaggtccagtttcaatttctttcatatggatagacagttattccaacaccatttattaaatagtgaatccttgccccattgcttgttttttgtgaaggttgtcaaagatcaggtagttgttggtgtgtggccttgtttctgggttctctgttctgttgcactggtctatgtgtctgttcttataccagtatcatgctgttttgattattgtatccctgtagtatagtttgaagtcaggtggcatgatacctccagctttgttctttttgcttaggattgcctcatctattcaggctctttttctttccatatgagttttaaaatagttttttctagggccatgaagaatctcaaaggtagtttaataggaatagcattgaatccataagttgcattgggcagtatggccattttaatgatattgattcttcctatctatgagcatggaatggttttccatttgtttgtgtcatctctgatttctttgagtattgttttgtggttctttttgtagagatctttcacccccgtaattagctgcattcctaaatattttattctttttgtggcaattgtgaatgggagttgtttcctgacatggctcttggctaagtcctcttaaaagcactcttttgatcatgtcgggcctatacataaaatccagaaaagtctctgtatcccaattttcttaactgaatcacatatttataatccttttgcaatatagggtaacatattcacaagttctgaggatttggatgtggacatcattggagggccgtcattctgctagtagaattgatttttgaagtttatattgactgtctacctaatcctttcaactctattacctaattaggatagtaaaagctgtgaaacccaagatagacatcttgctgggattaaatttgtctacttaacacatcattttactctgaattattttttgttcttcatcctggaagtgctgctttctcgttgatacataaattttattttattttattttatttatttatgttttctgagacagagtctcactctgtcgcccaggctggagtgcagtggcgccatctcggctcactgcaagctccgccgcccaggttcacgccattctcctgcctcagcctcccgagtagctgcgattacaggcacctgccaccatgcctggctattttttttattttttagtagagacggggtttcaccatgttagccaggatggtcttgatctcttgacctcatgatctgcccacctcggcttcccaaagtgctgggattacaggcgtgagccactgctcctggccataaattttatgctgcatgcctctgacatattatttttttctatagtcacagacttgaagtatttttaataagaccttcaaactaggaccaaaagaaaagtggttatactgaatattgttccattcacctatgccctctccctattaccataatttaatttaattttataagtaaaatgaggtttagtatctaaagagatagttgtaaacatttcctcaactacttggagactagattcctattcctatgaacatttcttcccttatttccaaacggttattaggtatatttttcactgatctcatcctacttcctacttcttcacttcaaagaaaatcagacaatttattttttgtgaccaaaaaaaaaaaaaaaagccctgctcattatgctcatgaatatccattcccctccctacctcagtaacataacatagtataagaaatttatatccagcaactctaccttcagatatcacttcaaattgtattacttgtactacctcgtggttactctggaaatgcaataacttcaggaatgacatgtgaactgtaatgtggttcagaatactttcaaagtgtttcagcagtgttacaagttctagaccccagcttctagcaggatattgtagaagaaaacttgcgtattttacctatgtatgtttatagatattttctcagttctttgctcactctaatttcttaaggttcttgtcatctctcatgtggtattatcatctttttgcctttacttaaacacatggaaagaaaggattttgtacaccttatttttaaggcacttgtaccacagtgcattgtgaagaaaaactatttatgccatactctaatactgactggttgttaaataaattgtaagcaagtaagttttttttccaagcagtaaggtcatcaaaatattttacatattagcacacatctttgaattttaacaaacatatatatttagatctcttgtcagaacactctgaaaactccactaacccattatacatgtaaaatttagggcatgtgaagaactgagtagaattcaactaaaataaatggttcacaaagcagtcaccagcttgcttcagctgatttaacaaatagagcaatctgatttatggctcagttatttgttggctgttattttgagagaagaggagaaagaaagagaatcgcttgcagtagttttgacagcactgtctccagatatatagaaattatccccatgggatagcctactcttcagtagaaactattgtgagtactctaattttacaggtagaaatctttctactgacaaaagttaaatattgttctgtaaactcttacaaaatcatcacatggtcaataactagatttttaagtctgtaacttccattttaaacatatataattatttagatttcagtgttctataaatcctaatgagagatgaagccagctggacttctgggttgagtggggacttggagaacttttctatgtctagctaaaggattgtaaatgcaccaatcagcactctgtaaaatggaccaatcagtaggatgtgggtggggacaaataaaggaataaaagctggccaccccaggcagcagcagcaacccattcaggtccccttacacgctgtggaagctttattatttcacactaagaggggtcaaaatacaacagattcttaatactaaaacacaacatgttgctatcttttttccttggatatgtgattgtgaatcactaaggggccttaacaactctagaaatatgaacatatagaaaagtaatgcatagtttgaaggacaatccagtacctttgaaaacaccaactacatagcttgaggaagatttaaaacaagcttgtccaacccacgacccgcagaccacatgtgggctcatgagggctttgaatgcagcccaacacaaattagtaaactttcttaaaacattatgaaaatagtttgcatttttcttttgcttatcagctattattagtgttagtgtattttatgtgtagcccaagacaattcttcttcttccaatgtggcccagggaagccaaaagattggacacccctgaaaagaatgaaggctgtaagaagactgccattgatggaaggcagactatcttacttagtaagaattgaggatgtttgtaagtgaggactggtaaggctacaggtgacatttatttcttcgtggtgactgtaccaccaagtcctaattgaaatgtggccatcagactgccctgccaaggagaacctggtaaatcattatcagaaaattatttcttttacttatgaatgtctttaggcacagttgtcttgggagaaaattaacctactgtaaatggttttctagaaaaccttagaatgtttctcatttaataaaaaactgaaattcaaacatgtgtctttgttacatgcatcaactacgtgctatgtttctagaagaagcagtatggtgacacctcctgcactattattctctacagtttagcatttgagctaatattggacagttgaacctacaggttaatcattcataaatttaacagatcctttgtaatttaaagtgaaaactttgagtatctcataaagcatacattactaacataataattaaacactatttacctctcttttaaatatataacaatagctattaaattgccatatgcatcatagtcacctgggagaagtattaaaatatggattgctgagctccattgccaatgcttctgattaattcagtaaaagggggtcccgataatgttttatttttagaaactcccaggttatgctggtgctactggttggggcacaacaaacactttgagaaggaaccgctgcttcatggcaaacgattgtattgggagacattagaaattctggtttctagagacatgttgttataaaaataatggagaatacattgcattgtatataagaagtgtattttattatccaaagctctttaaaatgtcactgttgtcaggatgtaataacaacattgagctaatggctcataaataattacaaacaacaactgacaaattcattagcgaagatcctgaaatgaaatggtgtcatctgaagagcatttattttgtaaaaatattgtttagaaatggatacctgttaactatatgagatttgaataagacataggtgcttgagctatgcaaagtgtatttttatttaaacagaaactcctgtctcaaaaataaaaattcaatataatttgaaccagaatttggttcaaaatgtggcaactatatcatttagtcatattctaagtgaatagacagtaattcaatcaagtataattgcttagttgaaatataaggataacaaatgagttacagcttttgctatttgatattttctattcactcagagcctgtgctccctagagtaatttgtcaactaaaatgtgatttaaagaggttacaaaattttatgaaaaaaatcatcctatgcctttaaaataggcaacaacattttaattactttaataaaacagaaatggataatgtgtagattatgagataatgtaaagtctttaatatcatgactgacttctaaatgttcaaattgtgtgtcataaaagtggatgcttatgggctgggcgcagtggctcatgcctgcaatcccagcactttgggaggccaagacgggcaggtcatggggtcaggagattgagaccatcctggccaacatggtgaaacactgtctctactaaaaatacaaaaattagccgggcgtggtggtgcacgcctgtagtcccagctacttgggaggctgaggcaagagaatcgctggaacccaggaggcaaagattgcagtgagccaagattgagccactgcactccagcctggcgacagagtgagattatgtctaaaaaaaaaaaaaaaaaaaaaaagtggttgctatgaggattaaaatggtaccaaattaaaaaaacagaaatttgaaaactgaaactaaaactgttgttgtgaaatgaagtagaaatcacctaaccaatttacgaaaagaacatgaatataaaaagggtggtatgagatattctgtttttcaagtgagcactcataagtgtagattaaataagttatcaaaaaataattaacaacgaaaaaaacatgaaactggccttatactcaagagttttctttggtaaacattagtttgtgtacacacttcatatgtaattagaaataagaattgataagaagagacaacatgcttgtggaagttgcaagaataattattttcctttagccttgacatttcatttccttcctactctgaaaattgtcaaatgaagttcggcacctgcttgcagccccttccgtgtctactagggatgctgaagtaaactttattatttgagattcttgtactgcaaaatgcataatagattttcatcatgtctagtgttctctacctaagaggagcttaggaagagtttgctagtcatagtaccaaaagaaagacaaatggacttatatgcatctgaaaatcgacttttagattgagattccctaatttattctatatcggatttgcactttgccgttactatgttaactatccactctaagtttttaatcatttattctatggatgatatgatattatatcatatctcatatgagatatgatataatatgatatgagatatgatatatgatataatatgatatgatatatgatatgatatatgatataatatgatatgagatataatatgagatatgatataatatgagatatgatatgagatatgatagaatatgatatgagatatgatataatatggatgatatgatataatatgtgctttctcattccacgtccaaactatatcattgattagagtatcctgaaaatctaattgatgttgattttctaaaaataaatttctgaaatacctgtatttagttaagtattttattattgtagctaatctgaaggccaatgttgttttccagatatgccaacccaaaaaaatatttggaggcatgatgttatacatatgggtttagatacacacataggtataaacacatcagtatattttacaaaagtcattttcttaatgttttaaaaaatttagtttgatttttaaccataaatttttcatgttgataaatattcttatctaatagtattttcatatttatttcccattgtatgacgtatcatgaaaaattgacaagttcttattactgaatattgagattgtatcaaatgttttactgttgtaaataatactatactagacatctttacggccgatttgttcactctttctgaatatttctttggaaatatatattcagtactcatttatcttttcaaaatacaaacatattgcctaattgttctccagtttgtttatcctggtttacatatatatcatttgtatttgagaagcataactttctaaaaatttaccaatatttcatattaagaatgtttaatttttcataataagtaaatctgtagaaatagatcacatttccaaaaacattgcataaaatgtatggtggtaactattgaaaataacaatgtcataggtattctcaggacttctttagaaccaatataaacaccgattaaaagaaaagagcagggaagagaaatagctcactaatatccccgtaaaatcttttgttatacttaactaaaaaaataaattatattacattgtgttttctgctgttttgaaaatactgaaatgttgatccttctcaccaagtagaacatttatagaagagcaattatttttgtaggggtggtgagatagaaagtctgtaaattataacctaagtatcaaaataatccagctgtacagagtgatgttatttcaatctggggcaatacatattgtctagaccactctcaagatattaagaaactcaatgacattcctattcttttaataataacaaacatcaacaataaccattgtaaatacatttaactcgtacatctttaccagactcctggaaacatgaaataaagccgaagtcttacagaatatcgagggttaagaagcaaaatttcactgcaaataatgcgttttctttgattcatcactatttaaatctataaacagaaattgtgatcttcagatgctgaatgccatttcaatgaagaataaaggagatactaccacctagtggtaaaatatgctgctgaaaacaaagtattttcatattcaaatatttttagaaaagaccaggctgatgtgtgattgtgttatggttaaatgaagtgtgcaataattatcaaaattatgcatctgttaggttcttaactgctgtgcactttattctgtttacttttacagtttaagcactttcacacggaaatagacattattgtgatgtgactagggaaaaattaataaactagtgtctttacagaatgattgaatctaattttcctggctaaagtagtcgttaatattctccattgcttaagacagtttaaaagagaacattttacttaaaacatgcatttatcttacatttattttaataaatgtatatttaggtttgctcacataatactaaatatggtgaagttctgtagatttggaaaaccgttagcttaaattagcaaccatagattagagacattaaataccttaaagaaacttatctcttgaaaataaaatgtccatagataattaaaatgtagaatttttaaataagaatcaataagaaaatattcttatttgtaaaatactatatattccttgaatagtatattttcaaagaagtagcatgaattcttgtgattctgcacaggtgtattgtacaagaaatagcatttttttttgctagacatatccataatgtgatccccataacaggcaagtacaagtgaaacattacataaaagtaaaattaaattttaaaatacacctgaatgcttttgttgcttgcttgaagtttggatagatgttctataggcagtgttcactcttctcatgtagcatatacttaagaccagccttcattttgctctgcgtgttctctacaattgcataatacattgtgctaggaaaaatttaacaaaatgatgtttcattatgtcaaaaactatggagagtattttttttaatcacaaaatattttgccacaacaccacacctgggaacacagaatgctttctatctaatgcctcatgctatttaatcagaaaaaaaggatgctcttataagaatatattcaatgaaatattaattaatttattcaccgactacttattgagttcctcccgtgggccatacattattccaaaagtgtctgcaagtaactccctgagacagacaggatcttgtttgcattgaagctccttctctttttccttcttcctcttctcctctttcatatcctaagtggtagataagcagataaatttgattgtttgatttccttggttttctcttctattttttccttgttttgattttattaaactgctgtttttattattctatctactcaatctactttgagattcatttgattttatttttctagattcttaatttgtaaactgagctcaacaatgtaagaactttcttctttttctcccaagtgcttagtgctacaatatttcctgagtgctgtgtcctctacttcccgcaaattttgatatgttgaattttaattttctttcaattcaaaatacattttaatttcccatttgattttttacttgaactcttgaattgttcagaagcattatttactatctaaatatttgatgattttccagatattgttctgttattgatttaaatggaatttctttgtagttggagaacatactgtgtatgacttgaatacttttaaatttactgagatttgttttaggtaataaaatctggtctacattttaaacagtgcttttctactgtacctaagtgaagtgtttcataaatatcaattaggtcaaattgatagtattgtttaaattttctacatatttagtaacctttttcataatttttctattgagaaaggatgtttaaaatctgattataattttagattttgtatttctctttacatttttatcattttccttgattaattttaaaactctgttttagattgataagtattaataaatgttatgtcatttttaattgaccctgttattttcaaatgactctcttttgtctggcaatcttccttgttctaaaaatggttttctcttatatcgatagttatcccagcttgcttttccttagtgttatcaggtgatatattttttattgttttgttttaaccaatttgtttcatacattaaagtgggagcaagcatatgctaagtcttgctttttcatccaatctgaaaagttatgccctttaattgagatgttcagaccatttgcattattgtgattattgacatgggtattaattttctattactattataacaaatcaccacaaatttggcgccttaaagcaacccaaatttattatcttatattcagaaagtcagaagtcatgggaacaacatgctgacagggctgcattccttctggatgttctaggaaaatgtttctttggcttttccaacttctagggactgcatgtacttcttatctcacgactctgtcttccattttcaaatccatcacttaaatatcttaagaaaagctggtaccatttctactgaaactatttcaaaaaattgcaaaggaggaactccttcctaactcattttatgaggccagtatcatcatgataccaaaacctggcagagatacaacataaaaaggaaacttcaggataatatccctgatgaacattgatgcaaaaatcttcaataaaatactaagaaacagaatacagtggctcatcaaaaagcttatccaccatgatcaagttggcttcatcccagggatgcaagattgggtcaacacgcacaaatcaataaatgtgattcatcacataaatggaactaaagataaaaaccatataattatctcaatagatgcagaaaacgacttcaataaaattcaacatccattcatgttaaagtctctcaataaactaggtattgaaggaacatagctaaaaatagtaagagccatacatgacaaacctgtagccaataacatactgaatgggcaaaagccagaagcattccccttgaacactggcataagaaaagaatgccctctctcaccactcctattcaagatagtattggaagttctggccatggcaatcaggcaaaagaaaaaaataaaggaaaaaagtaggaaaagaggaagtaaagttatctttgtttgcagatgacatatatagaaacccgcatcgcctcagcacaaaagcttcttaagctaataagcaacttcagcaaagtctcaggatataaaatgaatgtgcaaaaatcactagcattcctatacaccaacaacaggcaagcagaaaaccaaatcatgaatgaactcccattcacaattgctagtaaaagaataagacacctggaaatacagctagcaagggaaatgaaggacctcttcaagaattataaaccacttctcaaagaaatcagagaggacacaaacaaatagaaaaatattccatgctcatggatgaaaagaatcagtattgttaaaatggccctactgccctaagcaatttatagattccatgcaattcccattaaactaacattgacattcgtcacagaattagaaaaaaatattttaaaattcatatagaaccaaaaaagagtctgaatagccaagacaatcctaggcaaaaagaacaaagctggaggttatcacgctacccaacctcaaactatacttactacaaggctacagtaattaaaagagcatggtactggtacaaaaacagacacatagaccaaagcaacagaatagaaaactcagatataagaccacataccttcaaacatctgatttttgacaaacctgacaaaaacaagcaatggggaaaggattccctattcaataaatggtgttgggagaactggctagccacacgcaaaaaaaaaaaaaaaaaaaaaaaaaaatgaaactagacttcttccttacaccttatactaaaattaactcgagactgattaaatacttaaatgcaaaactccaaactataaaaaccctggaaaacaacctaagcaataccattcaggacaaaaacaccaaaagcaattggagcaaaagcaaaaattgacaaatgggatctaattaaaaagagcttctgcccagcaaaataaactatcatcagagtgaacagacaatctacaaaacaggagacaatttttgcaacctatccatctgacaaaggcctaatacctagagtctgtaagaaactttaacaagtttacaagaaaagtgggcaaaggacacgaaaagacacgtctcaaaagaagacatatatgcaaccaaccaatatatgaaaagaagctcaacatcactgatcattagagaaatgcaaatcaaaaccacaatgacacagtatctcacaccaatcagaatggtgattattaaaaagtcaaaaaaactgatgctggctcagttgtggaggaaaaggaacacttttatgctattggtgggagtgtaaatttgttcgatcatcatggaagactgtggcgattcctcaaaaatctagaggcagaaattccatttgacccaggagtcccattactgagtatatatccaaaggaatgtaaatcattctattataaagatacatgcatgtgtatgtttattgcagcactattcacaatagcaaagacatggaatcaacccaaatgcccataaataatagactgaataaagaaaatgtggtacctatacacatggaataccatgcggccataaaaaggaatgagatcatgtcctttgcaggaacatggatggagctggaagccgttatcctcagcaaactaatgcaggatcagaaaaccagcatcacatgttctcacttataagtgggagctgaacaatgagaacacagagagaggaacaacacacactgggccctatcacggggatggagtaggggcgagggagagcattaggaagaatagctaatgaatgctgggcttaatacctaggtgatgggttgatctgtgcagcaaaccaccaaggcacatgtttacccatgtaacaaacctgcacatcgtgcatgtgtacccctgaactgaaaagttgaagattaaaaaaatgaaatcaaatgaacaaaagtaaagaatctttaaatctctctctccctttctctgtctctctctctctctctcacacacacacacacaaacacatacctatgcttctgttgtcatgttgcttctctgacattgaaacttctctctctctcttacaaacttgtgattacactgagctcaacttaataattcaggataatctccctctcttaaaatcattaacttagacatatatgcaatgttcttattgccatgtaaaataacatatttactggttatgggaattaggacatcacatctttgtaaagcaaatattctgtctaccattttgctatttttttctttttgtgtcttcattcctttttttttctttcctctttttgtaacgttctttgggtttaaatattattctattcattttatctagttcatcaccttttccaggttattagctatagcactttgcattatttctgtggttactctaaggtttatagtatgcagctttaagttgtcacaatataccttcaagttttgcatgaagtctcttacaaaagtgtatttccatttctccctaccaagttttgtgatgttcctggtacatatgttttagactctaaaaataccattagtatttttactttaaacgatcaattaaggataagaggtaaaagttcttatagcaatccatgtagctaccattgacagtactctttatatatccaggtttctatctgctaccattttcttctgttttaaggactccttaaaatatactatagtgcatatccactggtgatgaagtctttaagtttttatatattaagcaaagtttttcactttctttttgaaatatatgttcactgggtaaataaatacagggaaacaggttttattttggcttttcaatgatacagatataattggatgaaataataattttgctatgtttcattttgtttagactctttcaaaattcttatttttaaagtattttaagatttttctactaatttattatgactgtcattttgttttggttatttttggttaattttatatttttcttaaccatgagttgtatttctctgcctttttgaatgtcaggtaattttgagtgcatactagataatgtgaatttaccctgttgggtgctaaatatttgctttgctaaataaatattcttgagactattgggggattcagttaagttacttaaaaccaattcgattctcttgagtatttatgctttgcttatgcagtgttcactttgtctctggctaattttttgtgggtaccaaagtaaggcccttcttacttgtcacgtgtgttttggcacagttacttctaagcatttcaggcaatttttccctcacctcaggtgaatttctcttacatgtatctgaatctatactcagatctgtaaggtatgatgagaaatttgcacatccgcaatgtcttttctctgcacagctttttgttcgttggcatgttggttttgtgacctacaaactcgagacacattggcttccctggattactatctcagtctcctcaattcagggagtacttcctgggttcctcctctgtatgtcatagcctggattctttctggctagtaagctgggaaatttttaggtttcggttggtttgctcattgacgcttagcgattattagatttacttattatttatccaatatctttgaacaatttttttcatatatttatgttggttttcagttgtttcagatgggaatttggtccctgttattgcataagaacttacttttatctttaaaatattttgaacaatataaaattatagtaaattttcaagactataatcaatacctaattaccctttgcttagattcattaatttttaaaattctgccttctttatttctatatatattaagaaaatagggctgggtgtggtggctcacacctgtaattccagcagtttgggaggccgaggtggggcagatctcctgaggtctggagttcgagaccagcatgaccaacatggtgaatccccatatctactaaaaatacaaaattatctgggcgtggtggcacctgcctctaatcccaactacttgggacgctgaggtaggagaattgcttgaacccgggaggcagaggttgcagtgagctgagattgcaccattatactccagcctgggcaacaagagtgaaacttcatctcaaaaaaaaaaaaaaagaaaaagaaaaagaaaagagttatttcctgaaccatttgaaagacattgtagacaacatggtctatatcctgaatacttccacatacagcacatctcttgagaaggaaaaattactacttagactgactagcaaaagtattctcttgtctcagtgatgtaaaataaaatatattctggtgtttttgtttataaaaattgaagaaatgaattcattaagtcaagaggtgagaatccggaaccaagcactaaattaattgttccacactaggagctaatacctagaagatacattccatatagagcaccatctgattaagctcatgaagcaaaaggtagagaagataatgatgaaagaggaagcagaaccataaacatggacaactataaaaattatgtgatgaaatctacatgttcaagaccctaaggtgttaaatataacagtgtttataagtgaagcatttttaaattcataaatattcctatttgctgtgttgcagagaatgtatttaaggtttttgaagaaaccaagtgagactcagcacataaattataatctagggtgacttaacataggttgctttttaagaggttcagcatattaaaaatttgattaaaaattacaagaaacaacatgaatgaattgatgactgattatatacatacagtagaagaacaaaaggaagtctcaggtacatttgaggaacatcactgctggtaattctacttatggagatgagaaaggtagattggttttcctttatgaaagttaggggtattgaatttgggctttgatgaaggacaattagtgacacccctgtgtagatagatacccattgctatataacaaattatcatgaatatttgtatctcaaaaataaatattcattttaattaataacacacctgtattaggtacctattgtatgtaaaatattaaccacaaaaatagtgtctttaaataacaataaacatatttgtctcacacaatttatcagagccaagaatttcagtgtcttaactaggtagtcctgcctcttaagttttttatgatgttgcagttaagatgttgtctgggacttcactcaatccttgaacaggtgtggatggtacacttttaaggtaactcattcaaatgattgcaagttaatgctggttgatgggagaagcctcagttcctcaccatgattacatcactactgaacttatgtgtaactaaccaaaaaatatggtatggtatggtagggatatattggctgttgatactgaccacaaaatatgtctgtaaatctgtgtttactaggacagtcaatattttttccctgagtttgaaaaaatcattttcaaatgttcactggcaaatctggataacagcaggctcctcccacgcatgcagaccctgaccacaaagcaggtaattgaccttggccgggacaccagaatcgggtgaagtagctgactctccagaacagaatttaatattgtcttcaagaaaccaaagggaagcatgcaaatcctgtcttttctccccaggaaagagtgaaaggagggcaaagggaaagaatatttcctagtatttcttttttttaattcaatttaatttaattttaagttccaggatacatgtgcaggacgtgcagatttgttttataggtaaatgtgtgctatggtggtttgctgcacctgtcaacccatcacctgggtattaaaccccacgtgcattagttatttatcctgatgctttccctcccaccacactccctaaaggccccaggtccctagtatttctaaaataattacattcaaataaaagaataagaatagaaaatgcggtttttccactaacaacaatttcaggtatagcaatctctacatatcttgtgattatgtcttgaatcaacacgtcctatctcaagcaaggaactagattggagattaaaacacaattatgtttaaaaaacataagccctatgcactattgaaatttacctaggagaagagataggaaaagcaaagtaaaaagagaagaggatttgttaagcagtttgtgatatatattaattaatatttattttttgtgttctttaatagggtaaaatcacacgaaacatttgacacaacattaatatgagttttcaaccatctttgctactttataaaagtaaaatgaaatatactttacataaattattaaagataagtgtatatattttgtacacagatactgtgtcattataatacttaaaataaaataaataatattatctgaccaaaaagatttgtgaaattctggacaaagttatatattgcatgggcgggtaatctgtaaaatgagtctaaaatgggtccaactatgggtagtcttgatgccaggtaaaaagaaccaataaaacttttaaacaggagaggtgcacaaacagatttcgtttgaatactaaatccactggcatcatacagaattgattataggagaagttttgtgtcaacaatacccagaactactatgcacttaacctaatccagaacaaaattctcaaatttgtgtttttttcagtgcattttattatttatttattttttacttctgcacatgtatcccaaatttctattttctagagtttaacgtaatattaatattttaacataaaatagagaaaactaatttaaatgacttgtatatttatatagtctttgatccagttttctcttttgttgtttcttggttctataggaaagattaagactcattgattgagttagtcatggcagtcaccccaaaatgattacaagactgttaatactgcatgataattaatttcagaaagtaaaatcttctagaaagttttcttcattacttactgtctttttctttatttttaaaaatgtttgccagctttgagatataatccctagaccataaagttcccgcatttaaagtgtacaattcaatggcttttagtatattctgagttgtgcatgcatcaccgcaatcgattttggagcatttaattatttccttccaaaaaaccctctaaaacctttccatacaacccagcttaaagcaaacactaatctgctttctgtctttatagatttgcctatcctgaacatttcttatgaatcatacaatgtatggtcctttgtaattggcattttgaattagtatgctttcatcctttttgtaccatatatcagtacatttattttttaatttttaaatgtaaattgaaatatacagaaggctgaaaaatggacccttatctcacatcatacagaaaaatcaactcaaaatgaaatacagacttaaacgttagacctcaaactgtaaaactactataagaaaacacaagggaaaaaattacatgacattaatctgtgcaatggtattttagatttgaccccaaacgtgcaaacaacaaaagcaaaaacagacaagtggaattacatagaaataaaaagctgtacaacaaaggaaacaacagaataaagagaaaacttacagatcgggagaaaatatttgcaagacatacatctgataagggattaatatccgaaatatataaggaactcaaacaattctacagaaagaaaacaaattctataaaactcaaacaattctacagaaggaaaacaatttttttttctaaacaaagaaaacaaatttgtttctttccatagaaagaaacaaatcatagaaagaaaacatacaaataatggtctgttttaatccaaacaaattttggattaaaaagtgggcaaggtatccaaatagatatttcttaaaagaagacatacaaatgacaaaccagaaatatgaaaaatgttcaacacactaattctttctttaaatctagaacagtttaaaaccagtcacatcattttcagtggcataatcaacataagtaatgtaagtattcaaagaacatatctgttcttttaaatcaattatgacctttcacatttcaatgaaaatgtatgattttaacaagtatctgcaggttggttgatccataggcttcataacaacctcaggcatcagggtcttttctcatccacaatatcagctgcatcataaatctcatatcttcttaattataggattggtgccaacagcaccaattatatgtacttccttattagagtcatttgggagccatatgccaattactattccctcctgtcatagtattttgagttatggtggtagatacaagcatgaagtaggtaaaagacaaatttctctcctatattgttaataatctctatgactcgttgtctttttttctattttaccttatacagaagaggcctgatcactttccattaaacatttgaaagatttagaaatagatacattgcttctctaattggtattttttaattttgtattttgttattgaaaaatacatagttttcactatcatcagtatcaaaagtttatattttgctagagcaatcctttggaaatgcatatcaattattcgaaaatgttttgaataaagcaacttcttgcgatagtctgttgaaacacagcctcatacagaacactgtgggaaaaattagttcaccattttcatgtttagacaattaaaaataatttgaggtattaaaaggatactcaggaaattagaaattgttattctatttgggagcagctatagaggtccttatgttgtagacctatataaatttgtttcttataaattatgtttataatttatatatttttactttatcttttttttttttttttttagacaaattctcctgtttcccaggctggagtgcagtggtgcgatctgggctcacttcatcctatgcctcccaggctcaagcgatcctcctgcctccaccactggaataactgggactacaaactcacaccaccatgcctagttaatttctgtatctttttgagtagagatagtgttttgccatgttatccagggtggcctccaacccgggagctcaagccatccaccctcttcggcctcccaaagtgctgggattgcaagcatgagccactgcactggctaattctttattttaatgttcatgttttcattaggcaatttcagtacacccaagtgtattttgagaagtgattcacttttaatctctcctagtttctttcaattatggccgcaaaattcattaacgttgtatgactgatttaaggaaatgctgttgcattagtgagtatctacttttataaacctaaaatagtttcttacctcatgtctccttacaatcatctgattatagacagtatcaattctatgaacttgcatacttccaaaaagaaaatacatatcctgggacttttgtatattttacatttttcttgatttttaaaattcagtatttaagttattttggcagtaggagcacggaaacaaaatgacttctaagaaagtttaaatctatggaaacaccaattttctttttttttttttttgagaaggaatctcgcactgtcgcccaggctggagtgcagtggcgcgagctcggctcactgcaagctccgcctccgggtttcacgccattctcctgcctcagcctcccgaggagctggaactacaggcacccgccaccacgcctggctaattttttgtatttttagtagagacggggtttcaccgtgttagccaggatgatctcgatctcctgacctcgtgatctgcccacctaggcctcccagagtgctgggattacaggagtgagcccaccgcgtccagccctattttctttttttcttcttcttcttttttttttttttttttttttttgagatggagtctcgctctgtcgcccaggctggagtgcagtggcgcaatttcggctcactgcaacctccacctcccggcttcaagcgattctcctgccttagccatccgagtagcgggattacaggtgcctgccaccacacctggctaagaaagacctattttcattcttaaagaagaacagtgagaagtatttaagatacttactcatgttgtttcacattctaatgcctccctaatcatccaccaacacattacaaaaaaaacagcaatgtacagcaatgaattgagacaaagtttccattatatgtctcagacatgtcatttccaacagagcctattggagtctttattaaattaaatgctttttacttacaacaagattcacatggcttcttcagaaatcctagggctactaaagtaaataaaattttactaaagttttcaaaataaattttgtaattaaaattttaatcacactgatttactgaagggatagaatacattcaagtgtaacaaatatccaaaacatttttaaaacccaagaagttataataatagctctatctcaatgtgattatacttgcaatattttccataaaattactttaaaagattttttcagtatttaattactcatagacattgtgcaatattatcaaattatatttaaatagttgtttaaatagtcaaatgtatgcatatataaaatattagaaaatcataaatatatgctcttagaggaatgctcacattttagattagttaaaaaaacacagcttcaattactgataaacatgcagttgaatatagttttctaaactatattcaaaagtatagtcaagctttagtatcttatgagtaaacacctcgaattttgtcaaaccacatctttatgtatagtgtagtgttataggcttcactatcattatgaaggtttacatgttaagctgtcaaagttgtagtgtggtaatgaacagataatttcagatcaattgcaatcagtcaacttaccccataacttctccgacttatcctcagcagattattatgttagacattatggtgttgttaattaatgtattcagatttgatgggttatttttctaacatgattttagatcatgataggaatttaaagtgaagttaattacttcttatttccaagaaagtaatgcattggtgctccacatgaaaataaaatgaacttacattaaaattatttaacattacattttttaaaattatttaatgataatatttaaagagaaaacttgtttaccaatatatgttgcatcactatatgaataagaacatacctattctattagtcttttttcatgctgttgataaagacatacccaagactggagaatttagaaagaaaagaagtttaattggcccaccgttccacatggctagggaggcctcaaaatcatggcagaaggcaaagaggagcaaagtcacatcttacatggatggccgcaggcaaaaacagggaacttgttcaggggatctcctctttataaaaccatcagacctgtgagacttattcactatcatgaggacagcaggagaaagacccacccccatgattcaattacctcccactgggtccctctcatgacacaggggaattgtgggagttacaattcatggtgagatttgggtgggaacacagccaaatcatatcacctacgaaaatagacaatagttgttatgtgaaaattgtatgtgtaaatatttccaagacttttgtgtaactaatatttaccatattgggctattttgaggtaaaaatgaaataatgcatgtaaaatacttcagccattaaatgaattcgctaaatcgtacatgctgatagacacatttcaagaactctcatgactggaaaagagctttagttttgatcaccaggcaaagaacagcagctagctcttgagtacaaactagggcaacatggaaagtcagtattaaaaggtagggatgaagagcagccatgccccataaacattttcagaaataaaaacttgtttccacttgtatttaaattttttttgcttctctaaatttggatattcaatttgatgaattatttaccctatcactcttggcttttctaattctttaaaaatatactatttttgccagcttgtttacatatttttaagaggttgtctttggattgaactaaacatttattaagtaatttgcaaaatttaagaaaagagattttgatgggattgacctataatttaaaggataaatggatatcactagaaattttaagatacaattttgaagaatttcaaagtaatcctggaaacttctaaatatgattgtaggagactctgcttgaatagaggtgatgactattaaataggcatatcaaatgatttgccttgagacaggaaccaaagtatagtgacaggattgattagatggcgaaacaataaaagcaccaggagctaagctacattgatggggtatgtcctgtttgataacagggttttgttcctaactagcattctggttcaaaatccataaggtttagctattttcctatctctttcactccatccccatccactcactgatttcttttgtttctatggacgttattatgtgacccagtttattacatttgactgatatggttttgaataaatgtataaatatacacagacatgtgtttgtgtgtgtgtgtgtaatcaaacaagtatattactcaaaagtagaaaacaatgaacagtggaagtcaaactcttgtttttctggttttttttttttttttgagaggaagcaattgaagaaatgagacatcaaattaatcttttaattgggatactccccattggcacttgttttatgttcataaaattctttaaattttgtattggaaataaaattttatatttgtatctcactcttcatacatagtataatgttcttcgcaattaggaaataataaaatagtgataaaaatttaaactatttagaaaataaacggcgattgtattccaaatataactcccatgagcaagtaggtaaatagaagagaggagagaaattttccaagtgaatattaaggaagatgcatgtttgggaatgagagagagagaatggagtctgagtgaattacagacagattatgcgagcataattattttgcacattactattgctgcttgcaatttcagcagcctccctttctatcacagttgaagatgaaggggaaaggtgctttattatttccatttttgaaagcccttatttttcttcatgttgccaggtctaccttaaatcagtaaggtctgtggctgtccagatgcacatcataatcggcacagaactctaccatttggtcaaaaccaaaaactaactgggacgcctaaggtatttgtttctttctggcctttaactgctatactcattcactttctgattgtgcttttagcacttaacaccaatgccagagagtggtcatttcctctttagtaaataggataatggtatacaaatgctgaaaaaataaacatcaaaatgagacactctatatcaaaagacctctaatgcccagattactctcattgtctcatagataaacagctgctagattaacagtataatttttaatccattttcggagtataaaacttgtcagtgaacattcgccaggttaactttctcaagattccctatggacaccattgcagaaaacacagacaaaggcacccccatgctctgttgtgtcaagataggtgggtactacaggactatcggagttttctgaacacacttgtttttctgacttttgatttctaaaccctgaggtcctagaggagattataatatggggtaaagggaatggcaagaagttgagagatcgggttgccattttctatacattgagccaagcctgctccatggtagttggagaggtggcagaaccaaaacgggaggatgcacagctgggcccaagtatgccttggaactaatcaatattggtgattaacaagggtgaatattagggaattacacaagtcagttttcaaacaaactgtctcagtccatttaggcagctacaacagaacagcatacactaggtggtttttagcccattcttgagtttttgtttttgttttttgtttgttttgtttgttgtttcttattgagatagggtcttgctctgtcacccttgctggagtgcagtggcacaatcatggcttattgtagccttgatctcctaggcttgggtgatcctctctcttcagcctcccaagtagctggaattacaggcctgcaccaccatgcccagctacttttaaaatttttggtggcaatgtggtctctatgatcccaggagtgatcacctgattttaactggttttccctttctatcactggaagaagcactgaaaagggtaggaataacagtcttgaatagctgatgccacccctctctgatctcccagcagtggccccattacatggagacaaattctgtgtgcttggggaagagacaacacagtaattgtgggaatttccattaaacctcagtgctgccctgtcaaagcagaaagcaacatcaggcagaagtcagtcagtgcccacagaaggggcatttataccagccctagccagaggggaattgcccatcccagtggtcggaacctgagttctagcaagtcttgccactatgagctaaaggactctggggtcctaaataaacttgaaagacaatctaggccacaaggactacaattcctggtcaagtcctggtgctgtgctgggcttggagccagtggatttgtggggcctgtgacctggggcagccaagggaatgcttatgtcatccctccccaaccccaggcaatgcagctcacagctctgggagacaccacttcttttggcttgagacaggagagggaaaagtaaagaggactttgtcttgcaacttggatactagctcagccacagtaaaacaggccatcaagcaggcctccattctagaccctagctcatggacatttctagaaacggcctgggccacatgcaaaaccactgccttaaagaggacccagtcctcacaggattcagccgctgctgcctaaagaggcccttgggccctaaaatattcatcagtgatagccaggcagtacttgccatggaccttgggtgagactcagagatgtgctggtttcaggtgagacctaatacattcttacctgtggtggctaaagggagagactctgttggcttgagaaaagcagagagaagactaaagtagactttgtcaggtaccttatatagcagctcagccatagtgcagtagagcactaaagcagattcttggggccctgattccaggccttggctctctagcagcatttctggacctgccctgggccagaagggagcccactgacccgtagtgagagtctcatgcctggtggcattcaccacatgctaaatgaggagtctttggtccttgattgaacattggagataccctggcaatacacacaacagacctagcatgcaccatctttgacctcaggaatagcagaccaaactgtctaagttatatatatattgacattttgcatatgtattagttattgagatattaatcctttttcattatcttaaaatcatatatctatttaaaggaacataagatatggaatgtagtattcaacccatatattatctgatattatctgttaattatcttaaatatcctcttttctatttcaaatctttctcaatactttcataatattgatatttcacagagtaagtccaacattgttaaagtgtgttaatttactctcgaaatttttagatttaggtgtaaatgtctttaacattttatataatacttttaaaactttgttattttcacatagtttaaatgtatgtgtaatgttttcaatgatatacaacattttaatacaagcaatcacacatgaaaataaatatgaaaatcagtcacataatgggaaaaagagaactatgtgtgtgtgtgtgtgtgtgtgtgtgtgtgtgtgtatttgacttttgagcaatgcaaggggattgtggcacagcccccctgcacagtcaaaaatccatgtataacttttggttctccaaaaatttaactactaaagacctactgttgactgaaatccttactgataacataaacaatcaattaacacatattttgtatgttatattatcatatgctatatttttacaataaagtaagctagaggaaaaaatgtgattaagaaaacataacaaagagaaaatatatttactgatcattaagtcaacgtggatcaaaataaaggtcttcatcctcctcgtcttcctgttgagtaggctgaggaagaagaggaagaggaggagtaggtctggatttctcagggcagagagaagaggtggaggagattgaaggagaggcagagtaggcaggcacacttggtgtaactttatggaaatacattgtgatttttgcttgactttttgcttttttatttttctgaaaatatttttatatgacactaatccttctatcattttctctagtttcagtgcccaccatttcataggaatcaaaagcagtcttgagtaattggaaccctactgccaaattgcctaagatccatttattttctggctgtttctatgtcttctttttcattgtctggcagtggttcagaagcactcatctccatcaagtcatcttcgtttaattcctctggtgtagtaactattagatcttctatttctccatgacctatatcatggcattcttcaccaaaccccattgtttttgctatattcacatctttcatgatttcctcgattggctttttataaattctgtgaagtcatgcacaacatgtgaacgtagttttctctagcaggaatttactgtttaaggcttgattactttcaaggctgtttctataccagtaatggcatcttcaaaagtgtaatccttccagacttttttttttattattatactttaagttttagggtatatgtgcacaatgtgcaggttagttacatatgtatacatgtgccatgttggtgtgctgcacccattaactcttcatttaacattaggtatatctcctaatgctatccctccccgctccctcaaccccacaacaggccccagtgtgtgatgttccccttcctgtgtccacgtgttctcattgttcaatttccacctatgagtgagaacatgcggtgtttggttttttgtccttgtgatagtttgctgagaatgatggtttccagcttcatctatgtcgctacaaaggacatgaactcatccttttttatggctgcatagtgttccatggtgtatgtgtgccacattttcttaatccagtctatcattgttgaacatttgggctggttccaagtctttgctattgtgaatagtgccacaataaacatacgtgtgcatgcgtctttatagcagcatgttttataatcctttaggtatatacccagtgatgggatggctgggtcaaatggtgtttctagttctagatccctgaggaatcaccacactgacttccacaatggttgaactagtttacagtcccaccaacagtgtaaaagtgttcctatttctccacatcctctccagcaccagttgtttcctgactttttaatgattgccattctaactggtgtgagatggtatctcattgtggttttgatttgcatttctctgatggccagtgatgatgaacattttttcatgtgtcttttggcacatacatgtcttcttttgagaagtgtctgttcgtatcctttgcccactttttgatggggttgtttttttcttgtaaatttgtttgagttcattgtagattctggatattagccctttgtcagatgagtaggttgcaaaaattttcacgcattctgtaggttgcctgttcactctgatggtagtttcttttgctgtgcagaaggtctttagtttaattagatcccatttgtcaattttggcttttgttgccattgcttttggtgttttagacatgaagtccttgcccatgcctatgtcctgaatggtattgcctagcttttcttctagggtttttatggttttagatctaacatgtaagtctttaatccatcttgaataaatttttgtataaggtgtaaggaagggatccagtttcagctttctacatatggccagccagttttcccagcaccacttattaaatagggaatcctttctccatttcttgtttttgtcaggtttgtcaaagatcagatggttgtagatatgcagcattatttctgagggctctgttctgttccattggtctatatctctgttttggtaccagtaccatgctgttttggttactgcagccttgtagtatactttgaagtcaggtagcgtgatgcctccagctttgttcttttggcttaggattgacttggcaatgcgggcttttttttggttccatatgaactttagttttttccagacttttatgatgttcttcctattggggttttcaacaatagaaattttttttattttatagatgtaggggtgtacatttgcagtttggttacatggatgtattgcctactggtatataagtttgttttcacgctgctaataaagacatacccaagactggctaatttataaaggaaagaggtataattgactcacagtttcacatggctcaggaggcctcataatcatggcgaaaggcgaatgaggagctaagtcatgtcttacatagcagcaggcaaagagagcacactcccctttataatgccatcacatcttgtgatacttattcactatcatgaggagagcgtggggaaaaacccaccccccatgattcaattacctcccatcaggtcccttccccaaaacaagtgagaattatgggagctacaatttaagatatgatttgtgtggggacacagccaaaccatatcaatactcaaatttatagttgacaaaactgagatataaattggctaaataacaagtcttaagacttgtaaatggcagaggttagattcaaatcctcactgtcttactctacattaaccactaccctatattccttttcatttagtgattcatctgccaaacattcatttactgtgatgcaccattttataaataccatagagcatattttaataaggcaatggaaagcttctaagctctagaaaaaaatagaattgtgacattttgtaataggttcaaggaaatcctcaagatagttaaagtatggagaaaaatggactgagagtgttttttaggactattacaattatttattttaaaacaatcaaattctgaaatttgatttaaatataaaatatgattatgctcaaaacggtaatcagttctctcaaaaagaaaacaaagaaaataaaagactcggaggagaatatcatcatttgaaaatgcaaaaccagtttaccatattttaggtaatttttgtgtttaagatcctctctaaagatatttttgacactatagaaagttgtaagacatttttttaagtgtatcaggccctcaggaaacaatttaactaaaccatgcttcagaaaaaactaaaactaagtggttcaactgagcctgataattgaaacctaggttccaaaaattcctgaatagctctctgggactatcttaagtggtgaaagaacctgcctcattagggtattcatataatatttcaattatgctaaatacataaaacctcaaatgcagtcaacttatagaattttaatttaaagattattctctatcttccatgttatctatttacctaattaggaaagagcaaatacaaatattatttttctaacaaagtggctgataataaatttgtgaatttccggttgttaattagagaaagaaataaaggaaaaattacatttaaattacatttcacaataagtggtggctcacacctgtaatcccagtactttgagaggccgaggcatgcagatcacgaggtcaggagatcaagaccatcctgggtaacatgatgaaaccccatctctactaaaaatacaaaaaattagctgggcatggtggcaggcacctatagtcccagctacttgggaggctgaggcaggagaatggcgtgaacccaggaggcacagcttgcagtgagccgagattgtgccactgcactccagcctgggcgacagagtgagactccgtctaagaaaaaaagaaagaattgtgtcatccatttccctgctcattttattgcctcctataaaattaaagataaggctaagtatagtggctcgtgcctgtaatcccaacactttaagaggcccaagcaggaagattgcttgagcccaggggtttaagaccagcctgttcaacacagcaagatcatctccacaaaaaatacaaaaattagctgggtatgatggcatgtacctttagtcttagctacttgggaggctgaggtgggagaattgtttgaacctgggaggtcaaggctgcagtgagccatgatgacaccactgcactccagattgggcaacaaagtgagatcctgtctaagaaaaaaaaagaaaatctaaaagaaaaattaaagatagccagaaataatcacatattaagatgattaaaataatatgcctaaattgttcatcattacaacgaaatttattagagtcttaagagttaaaagatgaattgttttcaataaataaacttgtatgtagattaaaacattagagttcactagaccttattgtctcaaaaaacatttctctcacattagactttcttcttactttaaaaataaaacttttaaaccaacaatgttaattaggctttatctgagccccaaattctttaaaaataatcagtaattttaaatttaaagatttttttctgtcccttttttttccttagagggtgatttgtatttaatgtaatatatttaaaacatgtacaattatgatatttccctaattccaatgtttacaacagcaaaataatatttttgtgacaattgcaaatgactttttgtgaattctgcctgtaccttatatctgggaactatctactaacatggaaatgtagagaaagccaacaattttcctagaaagatagacttattcctgtcacagtgaaggtcacacgtattcccaggcctgttgaacatctgaagacagagattttgaagacagattgcttttttccctctgcgtagcattttgaaatatttctaagtgaggataaaatatgacaggcacagaagtgatttcaaaaaaaaatggtggagtaggcagctctaagctccttttctcacaactaaaacattaaagaacaatgaacaaccgtcagaaccaattttgtcagaactctgaaaaacagccaaagatttatagcaagcaggtgaacactgaatcaagaaaaaggcaactttacaatgaaagagatctgttgcattgttacttgctcttgtcacacctcttccccagtttggtggcagtcctagtcctgaagacaactgtccgtgttgctagggtgccatcctggtccttggattcagaaaaaaaaaaaaaaaagcatgccttattcataaattatcgtgtaaatctgttcttagctacctggagacaagctgaaggactaataaaaatgtactcatctctgtttcactgaactcacctaaggccagaaaagcagtaggcattttttgaaaacattggtgaataacaaaccacagatgtctggggctaatattcatggctgagacagacataaaatagaattcctaaaaccggggaggaaaatctgctagacagttatttgggaaattagggtgttcaaagtcacctgtgtagatgggggaacttagaaagctatacacatgatgaggataagatgcatgatcaaaaagttttggaagatcaggggctctcacctttggccaatctctagactcagtgcaaatctggctaaaagttttgaaagagagctgcagcatgaaatccactggcaaaaagtaagaaacacaagttttgatagtttgtttgttttctagctcctagtgttcaaagaaatgtatattgaaacactatatgcatatagctaccaaacaaagtcttcggtaaccaacacacagcaatgaatacaatctctgcaaaatagttgggaaaagttactagacaaatagattacgaaagccttcaaaataaaaaacaaacaaacaaacaaaaaacacaccctgggaaaagcaaagaatctgatttctagagttaccactttttaatattcaaatatgctgttttcaacaaataaccacagggaatacaaagaaacacacaactatgtgtcatttaatggaacaaagtaaatcaacggaacattagattaaatagacagaaattaaatagacattagattaaatagacagagattgtcttggttccttttgtgctgctataacagaatacctgagactggataatttataaactatagaaatgtatttttcaaagttacggaggctaggaagtctaagatcaagtcaccagctggttaattgtctgatgagggtcctgtccttgcttccaagatgtcatctgtaatgcttcatcttctaaaggagaggaatgctgtgtcttcatgtggcagaagtcggaagggtgaaagaataaattccctcattatataagggcacctaatcccattcatgaaggtggagccctcttgactcaatcacctctcaaggccacacctcccaatactgttgggtggaggattacctttcaacatgaattttggtggtgacaaaaacattcaaaccataccactgtgtccctagtcccccaaaattcaggtccttttcaaataaaaaatacattcttttcatcccaaatgttaactcatttttttaccaacataaaagtctaaaatgtagagtctcatgtaaatctgatatttataagacttattttatagtattttgtaagattagaatcttattttataagatttatcttgaggcaaatttcctctagaactgagaagcctgcgaaaataaattatgtgcctctaaaattcaatggtggaacaggcataggatagattttcccattacaaaatggaaaactagaaaagaagaaagggacaatagatctcaagtaagcaaaaacccaatagtgcaaacaaaattaaatctttaggttagtgaataatgtttgactccctggcttacctcctcaacacaatgggctatgaattgagtctccaaggtccaaaagcatacaaccttcatgactttgttaggcatagcccacagcacagctcctgtgtgctggagttgggtgcctgtggctctttatgagtggcattgcatactggtggctccatagtcactgggtactggggacatcacagccaccaagactctactagatatagttttagtgggcacttgctgcagtggctctgcccctgtggcaggtctattcctgaacctcaaggctctctgaggcgtacttctaaatgtaggttgaggcagcctgcctccacagctcctgtagtctgcattcctgcaaaattagcactatatggactctgccaatgttaatgcctgtaccttctagaggtatagctcttgactcacatgggcctactggagacatagctaggataattaaggagcactgtgtaggaatgtggggagcagagacatgagatggccatggatgtgttaggaagagtatcctcaaagatcttcaagatgtgttcgaggtcattctcctaatgtcttggtaagtagcaagtagcttccttctatccacattaatctccttaccaaacaggcacttggccaccgccttgcttttccctccaaaacatgctttttcattatttacatagcctggctgagaattttccaaatctgtatgtatcaatccttttcattacaaagcttgtctctaaatcatttctctcttctcaacttttactataagcagctaagagaagccacacagcattctaaatactttgcttcttagggatttcttgtggtcagtatcctagttcactgtccttaagttctgctttccacagagtcctaggatatggatataattcagcaaagtactttgccattttgtaacaagatgaaagacccagtttctaatgatatattcttcatttccatataagaccacatcagaatgtcctttactgtccatatttcccccaagattctatttacaactacttaaaaaatatcttagaatgattcaatctttatttgaagttttctcttttctgtgccctcatcagaatcacccttcagtttcaagttatggcaaaacaagcttctcaagaattcacttcaaaacttttctaagctctacttattacccagttcaaaagctgctttaacatttttaggtatttgttatagcagcacctcacttctctggtatcagtttcttcttagtcagtgttatactgctatatcagaatacctgacactggataatttatgaaaaacagaaatttatttagcacaagctggcagctgggatgtccaatatgaaggccccggcaggtttcttgtttggtgagcgttcagtctcagcttccaagattgcaccttgaatgctgcatccatggatgggaagagcactgtgtcttcacatggcagaaggtggaagggcaaaagaataataaactcctccccagcaactcccttcatacttgtaataaaggcccctactcccttttataagggcagaagctctagactcaatcacctttaaatggtcacgtctcccaataatgtcgccttggatgttgtttcaacataaattttggaggtgaaaatagcattttaactataggaaatatattacaataactttaaaatgtgttcaaagagttatataaagcacggtcaaaggactaaaagaaataaggaaagtgtggtataaacacaatgattatgtcaataaagacagagaaattacaaaaaggaacaaaacaaaaattctggtgataaaatataattacttaaatcaagttttattagaatggtacaaaagcagattagaacaaacacaaatcttcaaattaatctttggttggatgaatataaaaacatttgagttttgagagcagaaaaaaatgaataaaattgaacagaacccaaggaactgtgaaacaccatctagtagaacgaaatacacatcatcagagttccagaaagtaaaccaagagagaaaaagaaagaaagaatgtttaaagaaacaatgacaaaaacctccaaaatttgttgaaagacataaacttacaaatctaagaaattcaataaactccaagtagggaaaaactcagatagacacatactgagacacataatcactctgttggatgacaaagatgaaaggaacatcttggaaagagcaataaagaagtgactcaccttttacaagggaatctcaataaaactaacagtttctcttcagaaacaatgggagcagaagaagtagtatggcatatttaaagtatttaaagaaaaaaattaagtaaatgagaaagacctttaccagataaataaagacgaaaaggtttataactactagatctgcactacaagaaatgttaaagggagtcctccaagttaagatgaaagaacccttgacagtaacttgaagtcatatgaagaaataagaatctccagtaaaggtaactatatcagcaaacataaaaaccagtattataaaatttttggtttgttataattttactctaaatttataaaagtttgggatatgtgtgtgtgtgtgtgtgtgtgcaggtgcacattattgaagtctaatgtgaaaatatttcaaaaataaagcaagtaaaagtagcataagggctgtgtttttcattttgtggatactagaatatcagaatttatcatatttttctctatgatgtctttcttaagacatgcatgaacacaggttgttccactacatatgcaaacagatatataaagtcacttcaaaaacaggcttaaaatgtcagaattttaatgtgaaattgagagcattagagaaaagtctgtttggtataaaccctaggttttctctcacatttgaatatcatcctatctttcattcaggttaaattccttcatcccactacgtggtgcagcctgacaacatgcctcaaaatcattgattcttaccagtggactaggtcccagttgtaacaactgaaaataaatttagcatctgactgaatttcccttcatttaaaattagattatggaataacaatttttgaggcaacttactttatattgtctgagatgcttctgttgcattagcagaaagtctgggaaaaagtaaggtagataggagtgggataataaaggagatactgtgttcctgttggaccagagaccatacagaaaacaaaatagttgaaataaatatcccagaattcttcttaagaatatatttgctaatcttttcaaatcattatgagtttgtctttgtttgttatggatgaaaaaggacattttatggaattaagttttgatattattttttcctcttatatcagttagaagcgtatgcactactttctgcaggaagaatactctggaagagaagatcattaataagtaaatttttgcaggtggtattgattggaacaatattttatacaaaacataaaattgtcattgcatagtaagtcagaatatgctgcttttctttaaaatatgaaatatgtttcaaaatgaagacaaggatgaggtagcattgtattgaaatggcattatctgcagattttcctataaagctatagatcgtgcttcaactctatgcatttaacacattccagagctcccattatatttaaatgatggagcaaaatcacagatttctactgacacattgttttttcgaaagaaataaatttgaaagataactggcttgcaacgcctacaattttatgtaaaaaccttacttaatcacatcaaatagagtgtttgtcagctggaaaaaaaatagttccttcttaagcttctaaaaaaagatgccaccttaaaaagtattcaaataagagcgatatgtgggaaacctcattctttggcaacttatcacaacaactgattatgtatttaagcatgcataaatatactttctatacacatttaacctaaactgataacttttaacccataaaccaattaaattaaatcattccaaagtgatcttacattgctagtgttataataagcaggtttttcctagcataactatttttcaaaattttgattgtgtagagactcaaagtaaataacaagataatctatgataaaacatatctaaaacataaagtccaaagtttaattgctctgtgtttgttgattttcatgtatacattgcactccttgttgttgacgatggtgtggcattattcagaaacaaatagtttcacttaacggattcactgataaataccagtgatttcattagagatttatgctattgaaattactcagatatttatcagtgaatacactagtaattggataattattggatcataatttgtgctaaaatacaaagtttttaaaaatcttttattcctttcactcattctttcatttgttcaacaaatagtgacttggtgcttcctatgtgtcagcattgctctggactctgattctggcagtgaggcaaatatgcgattgttcttagaacttttatttttagtgacaatgggcaaatattaaacaaagtaaatattttaactacttaaaagtttacaaatacttcagaactaaggcaggggaaggagaaaaggtttccagaagttggagagtttattccaatattaagtagcgttataagagaatatctactaaaaagataatatttaatcaaagaacaaagaaaaaaggtagcaatgttgtgttctagggcaagaatgttgaaagtatataaaaaagaaagtgcaaagtttctgggctggggtcatatctttccattatacaaaggcatccaaggaggagccagagagagaatagtaggatataagtaagaaaaataatgcagggtcaaattatactggacatttcaggcctctgtatagtctattttttgctattacaagtattggcaaaaaaaaaaaagtgaattacttttaatggcaaaaaccgcgactgcttctgcaccaacctaatacaaggacaatggaatttattgtttgttgctataagcactaatgcctttaacagagaaaatgacagactcaaatcagccaattggtaattgaatgcatggtaggaaagttacaatgtatccatgggattatttaaagagaccataatttcttggaagtggaatgtaattgatgctgatgatctggcccaagatctgattataagaggagtagaatttcaaattgaactgttttctcagcaagtcaaaatcagggtcataaagtgaagggacaggacccagagagaagtgattcaggaacattaaagaaccagatctcctcgagctctctaaacctaaagaagtggttcacttttcttttttagactgtaacagacccctggagacttcccactggactcccctgaggcagatattttgcaaaagaaaacttcccgccatgagatcttttcccacattccctcttggcaacttaaccagaagataaggttaagttcatttccacggcctttagaacctctggaccttatacatgagaaaagacatcattcatggttggagtcactggacctggttaatatgtaccaaaaggaaacagaaaaagcagttctggtggctacatcttgcaagtactagaccagaatataaagctggatgagagagactttgatgatatgaagtactagggtttaaagggaacaccgaactcagtggattgcaagagcatctgacatcagccctactgtgctttaggcatggctcttggaaatatgacagaccacagtacatagtgtgaagtttctagacctgccctgatacagtgttgtggaaccaatataaagactgagtcactggacaagctagagtgactgtgtacttcaggattaacaaaaacattagtttcactaagtttataaagattgaaatttttacaggcttaacagtggctgttgtctataggccaagaaggattagcaagtaatgctcttatgaaacaaatgttgaagatgatatacaattctagaagagcaaaggaaaggtggtagcatgtaatcagtacagagagataaggaccaacataatttccatgccagttatcagcaactcaacagctgaggaactctattatgtaggaatctaagatcatggatgagctatcatcacagtttttaggggaactatagaaaggcttccaataaggatttttgtacatgtacatatatattcagaaagcagctaatgtggagaagcagaaggtcgatgtcagccactccagtggaaatttcaatcactcatctactttccaagcttgagccaactttcagactgagagtccaataattaaagcagaagctctgtttttctgagaaatgacctgatggcagagcaaatatatactgtaaagataattctcttcctctactcaaagtgtctgtagccgcaggtacatatggaaaagggagcacccacattttttgatatagtgtgtgaattgaaggaaagtcaacttttaccatagcctcccttcaagagtgggtacatatgaaaatcaggtaataaatttagtttaaccacgaattcatttcacaatgggtccaatgagtccatatatgcacaataaaactttatttcctgaattcataatttagatatacatacatagtaactggcagaacactcactctagttccttgaaatgtgaatgaataataattgtcataggaaaggtcaaggaaaagactgaaaaatgtctttataccacagccaagagacttcataaagcaatattgccttccagatacaatagaagagatcagtgccatttttaaaaacctaaaaagttgcagaggcagtttctactgtattctcatttcagtcacttgtgtggccacacaaaaatcaaatacatgatggcagattgcagtgaactctaggacacatacccaaatggtagacatacaaagctgttctgacaagtgtgatattactggaatgggtagacttgggtatgtgatacgtgttaattcttatttttagttgcagaattataattagacacttttttataaatttaagattttggttaaaaataatatatttgcttaaacataaaacacagtatgtatttttttattgctacaggtgacgatgtttctccagtttatagtgatcaaattttgttatccattgagttctaggaaagtcttgaattttaatgtttttagacagaaagtttcaaaggcatctttattgtcaataagctcttcagcttggataaaaggtaaaaactaataaaggattccatttacatttgttatgtctcacaatttgtattttcttggatccaggcaaaatgtttaaaaatctagttaaactcattacataaatttatacataacattttttctaactttgtttgtcaagataatcttataaacaatgtataaataaaatataatatactaatctcaggaattgatgccacatcctgaaaatattagctgaaaatacctggaaataaatgtgcaaagttctatgcattacaagaaagaagcatgtttagataaaattaactaggttgttataaataccatcttcaaaattattgttaaccctactaaaggttataaaatgtttttattaaaatttattcaatcatttaccagagtaataagcaaagtaattgtcatacatgtaaatatagaatttacaaaattaaatattcaaaatatgaaaatgaaacattaactgcaaattgtatagcattctttcatttatttaacctctctgaccaaagcaagctcgttcatgtttgtcaagcaattgttctttgacttttttgaacttggttaaaatggcactttaatgaaataatgtgggcataaaatggaaaacaataattaaaggcttttcttcaattatacattattagtacctagtttttccttcacttaatgtttacctttccaaggctaagaccagaagacatctggagactctaaggagagtactagatctgtcaaatatttcaatatatacagctctcattcttcttttcccaataacctagtgtaattttagtaaaacaaaattaatagtattcagttatagacattttaagcctactggtgtgtgtgtgtgtgtgtctgtgtttgtctgtgtgtgtgtgtgcatcttgggcctattttttagagaaaggaaaggtaagagttggtttatgctgtgtttggtcatatgcttacttaatactttttgtttgaaacaatagccaaataaatagataaattaattaaaatgaccagctaaattgtcacacaaactatatatataaagttaaaacatgggtcaacattctctttcaggtaattatgaagaataagcactctgtctcatggcatatttctggggaaaaaaaacataaaaaagaattttagttttctaaattctgaacttcaaatccctgcctccgtgcacaactacattattccaaagaatagcatctgaaatattatattttgttagatcattattgatttaatgatggcattggtcaagatgtaaagagcattctgtaaactagcacacacagctcacagctttcaatgtatttttttaaataatatttcttttcatttctttctttctgtttttgagacagactcttactttgtcaccgaggctggagtgcagtggtgtgattatggctcacttcagcctcgacgtcccaggctcaagcgattctcctgccccagcctcccgagtacccggaactacagacatgtgcccccatgcctggctaatttttgtcctttctttgtagagatggagttttgccatgttgcccaggctggtctttgactcctgggctcaagccatctgctggcttcatcctcccaaagtgctgggactataagcttaaaccactgtggctggtctatctcttttcttattctgagcaggaaataagaaagcaactgtggcaagatctgtgagatggtaaacaagtgccaacataaacttagacatatctagtataatctgtattctaatgctccagaagctccattgttttttatcctgtccctaccccaatcttgatgcccccttttattccagactctgctctggaatgaatagatatatttatgtagcttttgttaaagttcttgtcaagtatattttatgataaaaaatttgcattaaattttctgtagggcatgcagatacagctaaacatactacttacaaaactgtacattttaaagttgaatggatccctgctaagctacattgcattctgttcctgtttcttttttttttttcttatttggagaagtggtgactgagaaagaaatatttcattgttgtggcaattccttgaacactagcttcttatattacttgtaatatgtcagtcctagagccattcttcctcgtgggagttggcatcacacacatttataatggcagcaagaaacctcaatgtggatgctgaactacacgccacttcccagcaaagaggggaatacaaccacaagaggaaccttcttgacaaaacaaatgcttcacattgaagttctttaagatgtagatttaatttccatggggaaaggctgtatcgacatcaacagcagaatttcaaactgaaatgatgcagaaattcactgcaagccaaaatttcaaaaagaaaacatgtaggtccttagtgagttatattttgcttttagttaaagataaaaagaacccacggactttttaatgactgcaaaaagttgaattcacattaatgtcatactttggaacaccttgggtatactttcaagttgaataaattatggtttttattcatttaaggaataacctctggacatttccaaacctgtgtcctttctaacgtcattccaatcatgtgtagtagttttcatacaatcctggtttagaggtggttgtctaatttcttagtgacttttcctgaacatttttattttttccaattatatccaaagctactgaaaaatatattttatgcattacaacaaagttaaactttaataatgaccctgaaaatagtggtagagtgaatttaaacatttgaaaaatattttaaggaagcaattatagaataaataaatagtaaaaaatatatttttgatttgaaattcaatgttcatctatacatgtatggtatctatctatcaacattttcatgaaactgcctatcaaaacaaaaaggacatagctcatataagagttagtgaaaaagatagaattgttgagcccagttaaaagtctgtaagttaatatttgagaataaaacatttcttgaaaaccatgttgaaatattctttggatgaaggtttcttagtcacactagactttaatcacactagacttcaagttcctttaatgaaataacaattcctctttcaagacatttacacattatttattcaatcagaaaactgtccttggcatattttgccaatctaacttatgctcatttttaaagcatcaacttaatcaattattccttagcagaaactgaagtggccccagtgaaatactcttctcagcaacagttcacctatattgtccactgccttagagctgtggtttgatagttgattttgctaactgaatataatagaagtgacactgcatggcccttgaggtgagataagaagaagtcttacagattcctccctggtcttctaatgtgctctatggatccagttactataatataaaagagcatatgaaacctcaggaagaagctcccatgaagaggaaaaaaatattctgatcaaaagtctagttgagctcacaattaaaaaacagccttacccattagggatgtgagggggcaatattggaaaacactccagttccagctgggatcttcctgctgacattatattgagaagcaataagcttatttctaacaagcattacccaatctgagaattacaggcacaagaaacgattattattttaagcattggagtatttgctttaggaaattgtttaaacaatagttaaaaacaaacaaacaaacaaaaaatctcaaatatacttttcttttttttttttttttttgagacagggtcttgctctgtcacccaggctggagtgcaatggcgtgatcttggctcactgcagccttgatcacctgggcttcagcaattcttcctcagcttccagagagcgaggactacaagcctgagccacaatacctgcattttttttttctttaatgtagagacagggtctcactttgttttccaggctggtctccaatcttggggctcaagcaattgtcccacctcaacctcccatgctgggattacaggtgtgagccatgatgcccaattgtaatatacttatttcatagcaacatatacttatccatcatataactttttaaatattaaaatgtgtacttttatctgaacatgattaggacgtggatatgttttggagaggaaggaattattcagcttaccacaatagggtctgtatttcattggaaccgtaattaagaaattctttaaaattctagctggatgcggtggctcacgcctgtaatcccacaccttgggaggccgaggtgggcggattacctctggtcaggagtttgagaccagcctgatcaacatggtggaacctctctcttaataaaaatttaaaaaaattagttgggcatggtggcaggtacctgcagtgctagctacttgggaggctgaggcgagagaattgcttgaacctggaaggggaatgttgcagtgagcaaagatcactccactgaactccagcctggacgacagagcaacactccatcaaaaaaaatatattctttataattctgcctatcaccaagaagtctcactgtactggctatactcagtactcaggaaatatcaagggatggatagcacatttgaaatgatacttgcaaacctatttgagaaacactggttgtccaaggtcaaaggctttgctttgagttctcatggccattatgtccactccaacagaaacatacattcccatgggatcgcattactaaatatactctgcatctggacttctcactccttaaccttgattctgctctttaaatagtctgataaagccaaataatatacaagcgtgttgctctatgcctacgcttatcaacaataggttctgtggcctttttcaaatataaaacctaaaaacattctgcatgaccttcagcccagagatccagtttactagaaaaaacagccatgtaaggatggtctttaggctcaatggagggatcttactgttaaccgcaaacactcagaaaactccactaaatttatgtttcccaattaaaacttcacctatttacctccaagatttccctgctgatggtagatctaaaatgcagatttcttcaggtattcccagaattacaagtcataactagggaaaaacctcttccaagtaacttagatagtaggagattattagaaatgaaatttttctgcccaagagcttcagatagagacacacaaacgccagtattcactgataattagattctcctttgtttctttatcttcttttctatgtttatttttccttctttctattcatttaatgtttttgagggttacatgatattcttaagagctttacccttaaacttgttactttgtatatcagggggatatgctgtattaaatagacctactaatatcaaagctctttttctgacagactttttattgggatcgaatatgttctctttgatgatttcaggttggaaagaatcttggtttaaagagattattcaagactttctaataattctaattttcattcttcttgtattcatagggctttttaaaattcactttttccagtgtcttaaagtattccatataacaactcatttgataacttatggaaattcaaccacaatgagtacaagtcatgagaagtttgatggcagctgtcaccaataaatctgaaagttcaattgaccctagtggcacagatttgaaggaattaacaatatttgttaaataataagactcaatcccttctctgacaaaaaggagttattgtaggagactctggaagactgaaaaattaccgcttggccacctacctgcttcctcttgactttggtccatatggcttgtcctcccactctgatatttgcataatcttaacctctaacccaaccttcttgctaaaactatattacccaaacaaacagcagttaaagcccaaaataattatttcttctgagacccatatttgaccaaacattcccccaaagtagcttaacatctgctaaaacctttggcaaagccccaagaacattttaaccaccctctcccaagttagtacacacctttgaggtattttgcaagctgctatattctgaataaaggcttatggttgacgacatatcagtttctttttttccatgaatatcaacttttatagccttaaagagcacacatgacacactactaaatgaggacattatcttttattgtgtgtctagtctgagaataatgtttaattaaactgtttcagatgtttgaagatgagtaatagaaaatttgtatatttaactggaataactaaaaatatctaataaattcacatttctttccattaatataaatcaggagcaacttagggtaagcacaagactaaccacaaatttagtaataggaataattcacttttttactgagcttttgctgtgagctaggtcctgtgctaactatctgaacatgcaatttctcatttaattaccttgatgcaaagtatcacagggtcatttttccccaaagtgataataatgccatgatgacaatttacactaagcatgtttgcaaccatttgcttggcattttagccaacatggcatttgtatagtgtcattgtattggtctctattaatatgtgctgagagatctggcaagatggctgaataggaactgctcccgtccacagctcccagccaggccaatgcagaaggccggtgatctctgcatttccaactgaggtacccagttcatctcactgggactggttagagagtggatgcagcccatggaaggcaagcataagcagggtggggcgtcacctcacccgggatgtgcaagggattgggaaactccctccccaagccaagggaagccatgagggaatgtgccttgagagacagtgctatccggcccagatactacacttttcccatggtttctgcaacccacagaccaggagattccatcgggtgcctacaccaccagggccctaggtttcaagcacaaaactgggtggccatttggacagacactgtgctagctgcaggaattttttttcgtatctcagtggcacctggaacgccaatgagacagaaccgttcaccccctggaaagtgggttgaagccagggagccgagtggtcttgctcagtggatcccacctccaaggagtccaacaagctaagatccaccggcttgagggagggaagggcgtccaccattactgaggcttgagtaggctgttttcccctcacagtgtagtagaagccactgggaagctcggactgggcagaactcaccacagtgctgcaaagccgctgtagccagacttcctctctggattcctcctctccgggaaggacatttctgaaagaaaaacagcagccccagtcaggggcttatagatgaaactcccatctccctgggacagagcacctggaaggaggggtggctgtgggtgcagcttcagcagacttaaatgttcctgcctgctggctctgaagagagcagcagatctctcagcacagtgctctagctgtgctaagggacagactgcctcctcaagggggtccctgactcccatgcctcctgactgggagacacctcctagaaggggtcagcagacatctcatacaagagagctccagctggcatctggcaggtgcccctctggggtgaggcttccagaggaaggaacaggcagcaatctttgctgttctgcagcctctgctagtgatacccaggcaaacagggtctggagtggacctccagcaaactccagcagacctgcagaagagaggcctgactattagaaggaaaactaacaaacacaaaacaatatcaacatcaacaaaatggatgccaactcaaaaaccccatccagaggtcatcagaatcaaagatcaaaggtagataaattcacaaaaatggagaaaaaccaggacaaaaaggctgaaaaaggcctcttctcctccaaaggatcacaactcctcaccagcaagggaacaaacctgggtggagaatgagcttgatgaattaacagaagttagcttcagaaagagggtaataacaaactccttcgagctaaagaaccatgttctaacccaatgcaaggaagccaagaaccttgaaaaaaggttacaggaactgctaattagaataaccagtttagacaagaacataaatgacctgatggggctgaaaaacacagcacagggactttgtgaagcatacacaagtgtcaatagccaaattgatcaagcagaagaaaggatatcaaagattgaagataaacttaatgaaataaagcatgaagacaagattagagaaagaagaatgaaaaggaatgaacaaatcctccaagaaatatgggaccatgtgaaaagaccaaactacgattgactggtgtacttaaaagtgacagggagaatggaacgaagttggaaaacacacttcaggaggttatacaggagaacttccccaacctagcaagacagggcaacattcaaattaagaaaatatagagaacaccactaagatactcctctagaagagcaacccaaagacacataatcatcagattcctcaacattgaaccaaagaaaaaatgttaagggaatccagagagaaaggtcaggtttcccacaaagggaagctcatcagactaatagtggatctctctgcagaaactctacaagccagaagagagtggggggccaatattcaacattcttaaagaaaagaattttcaacccagaatttcatatccagccaaattaagcttcataagcaaaggagaaataaaatcctgtatagacaagcaaatgctgaggaattttgccaccaccagggctgccttacaagaactcctgaaggaagcactaaacatggaaaggaacaactggtaccagccactgcaaaaacataccaaattgtaaagaacgtcgacactatgaagaaactgcatcaactaatggacaaaaaaaccagctagcatcataatgacaggatcaaattcacacataacaatattaactttaaatgtaaatgggctaaatgccccaattaaaggacacagactagcaaattggataaaacatcaagacccaatggtgtgctgtattcaggagacccatctcaagtgcaaagacatacaaaggctcaaaaagggatagaggaatatttatgaagcaaatagaaagcaaaaaagcaggggttgcaatcctagtctctgataaaacaggctttaaaccacaaagatcaaaaaagacatagaaggccattgcataatagtaaagggatcaatgcaacaagaggagctaactatccaaaatatttatgcacccaatacaggagcacccagattcataaagcaagttcttagaaaccgcaaagagactgagactgccacacagtaatagtgggaaactctaataccccactgtcaatattagacagatcaacaagagaaaaagttaacaaggatatttgggacttgtaatcagctctgaaccaagtggacctaatagccatctacaaaactctccaccccaaatcaacagaacgtacatgcttttcaggaccacattgcactaaatctaaaattgatcacataattggaaataaaacactcctcaccaaatgcaaaagaatggaaatcatgacagtctctcagaccacagtgcaatcaaattagaactcaggattaaggaactcactaaaaacagcacaactacatggaaactgaacaaatagctcctcaataactactgggtaaataatgaaattaaggcagaaataaataagtactttaaaaccaatgggaacaaagacacaacgtaccagaatctctgggacacagctaaaacagtgtttagagggaaatttatagcactaaatgtccacatgagaaagtgggaaagatctaaaattgacaccctaacatcaaaattagaagaactacagaagcaaaagcaaacaaattcaaaaactagcagaagacaagaaataactaagatcagagcagaactgaaggagatagagacatgaaaaacccttttaaaaaaatcagtaaatccaggagctgactttttgaaaagattaacaaaatagattgaccactagccagaataataaagaagaaaagagggaagaatcaaatagacacaataaaaaatgataaaggggatatcaccaccaatcccacagaaatacaaaatagcatcagagaatactataaacacctctatgcaaataaactagaaaacctagcagaaacggacaaattcctggacacatacacactcccaagactaaaccaggaagaagtcaaatctctgagtagaccaataacatgttctgaaattgaggcagtaattaatagcctaccaatgaaaaaaagaccgggactagacggattcacagctgaattctcccagaggtacaaagaggagcctgtattattccttttgaaattttccaaacaatagaaaaagaggaactcctccctaactcattttatgaggccagcacaatcctgataccaaaacctggcagagacacacacaaaaaagaaaatttcaggccaatgtccatgatgaacatcgatgtgaaaatccgcaataaaataatggcaaaacgaatccagcagcacatcaaaaagcgtatccaccacaatcaagtcggcttcatacctgtgatgcaaggatggttcaacatatgaaaatcagtaaacataatccatcacataaacagaatcaatgacaaaaacaacgtgattatctcaacagatgcagaaaaggccttcaataaaattcaacacacattcatgctaaacaaactcaataaactaggtattgaagggacatatctcaaaataataagagctatttacgacaaacgcacagccagtatcatactgaatgcacaaaagctagaagcatttcccttgaaaaccggcacaagacaaggatggcctctctcactactcctattcaacactatattggaagttctggccagggcaatcaggcaagagaaagaaataaaggatattcaaataggaaaagaggaagtcaaattgtctctgtttgcagatgacatgattgtatatttaggaaaccacatcatctgaaaactccctaagctgataagcaacttaagcaaagtctcaggatacaaaatcaatgggcaaaaatcacaagcattcctatacaccaataatagacaaacagagagccaagtcgtgagtgaactcccattcacaattgctacaaagagaataaaatacctaggaatacaacttataaggaatgtgaaggtcctcttcaaggagaactacaaaccactgctcaaggaaataagagaggacacaaacaaatggaaaaacattccatgctcatggataggaagaatcaatatcttgaaaatggccatactgtccaaagtaattcatagattcaatgctatttccctgaagctactattgactttcttcacagaattagaaaaaactactttaaattgtatatggaaccaaaaaagagcctgtatagtcaagacaatcctaagcaaaaaaacaaagcttgaggcattacgctccccgactttaaactatactacaaaagtccacattaaccaaaattgcatggtactggtaccaaaacagttatatagaccaacgaaacagaacagaggcctcagaaataacaccacacatacatgaccgtctgatctttgacaaatctgacacaaacaggcaattgggaaaggattccctatttaataaattgtgttgagaaaactgactagccatatgcagaaaactaaagctggaccacctccttacaccttacacaaaaattaactcaagatgggttaaagacttaaatgtaagacctaaagccacaaataccctagaagaaaacctaggcaataccattcaggacataggcatgggcaaagacttcatgtttaaaacacaaaaagcaatggcagctaaagccaaaattgacaaatgggatctaattaaactaaagagcttctgtacagcaaaagaaactatcatcagagtgaacaggcaacctacagaatgggagaaaatttttgtcatctatccatctgactaagggctaatattcagaatctataggaacttaaacaaatttacaagaacaaaaaaaacccatcaaaaagtgggcaaaggatataaacagacacttctcaaaagacgacatctatgtggccaacagacataagaaaaaatgctcatcatcactggtcgttagagaaatgcaaatcaaaaccatgatgggataacatctcatgccagttaaaatggcaatcaataaaaagtcagaaaacaacagatgctggagacgatgtggagaaataagaatgcttttacacttttggtgggagtgtaaattagttcaaccattgtgaaagtgtggcaattcctcaaggatctggaaccagaaatgccatttaacccagtaatcccattactgggtatatacccaaagattatatatcattctactataaagacacatgcacacgtatgtttattgcagcattatttacaatagcaaagacttggaaccaacccaaatgcccatcaatgatagactggttaaagaaaatgtggcacataaacaacgtggaatactatgcagccataaaaaaggtgagttcatgttcttttcagggacatggatgaagctggaaactatcattctcagcaaactaacacaggaacagaaaaccaaatactgcatgttctcactcataagtgggagttgaacaatgagaatatatcgacatagggaggggaacatcacacactagggcctgttggggggtgggggctaaggggagggatagcattaggagaaatacctaacatagatgacgggttgatgggtgcagcaaaccaccatggcacatgtatacctatgttacaaacctgcacgttctgctcatgttcctagaatttaaagtatattaaaaaatatgccaagtgcttattatcagaatgttaacagaaaatatagacagaaaaaataactttgtgtatatactctgtcataaacagcacaatcaccaaattttagtcatactatgctcttaaatcatatctgatgtttctaaatttttaaagtattgtgcttcttttaaacaaagatccatatacaaatgttgagacagcctgcagcatttaagttgcaaaaagatgctctaagtggaaattgtgtataattttgagataactaagcagtatacctagacaatataacaagacaagttcagtagcataactcttagcggcaggtattataaattaggtaaaaattacattcacttttaaagaaacactgatgaattcactaataagggaaagacattacacattattttaaacatactgttaaacagacactattgtaatgctgtaatgacatcccagtaggcggcacatattacacaccatttaccgcggcaaggagcatgagagccattgcacaactggctacaggaggataaagtggtaaatcgcagcatcactgaagcatgaatgtagcctaattaacaaaactgaagcttctacactcatgctgtcttttcacatgtcttaattcacttgcatggtctatgcctttgtgttcagtagaatgttgcttctcactggcatgctgcagtgtttctcgtctacctgctgcattttgagtgatatcttaagatgctgtgcatgcaattatcttttgctcagtagtattctacttaaaatctaccatctaacttctagcttcttctattaaaagcaagtagaaatgtctgacttctggaatcacattcaaaaatatatttcttaatttcttgtagttatgagtgtaattccgtttatttcaacaaaatcctagctaaattcttttctacaatttttaatacccaaggatattaacttacactggagagtaatagagaagaaaacaaatgaggcttacctttcttgatgacaggcaaaactactcatctctgaatacttctgtcagcctctccgtcttcaaaatatacatcaacttttctcttctctctccattcagtagaatgaaaaactgtttagttttatatagctgcactgttgtaagtcatacaaataatattatctgtatgaaatagtgaaagatcagttgatagaacatcttaagtcctgttgtttaattactgaaacccgtttaaatcttctgtggcataatttgctctttgaatcatgagagagtgattgattacttttggaatgttactgattttgaagttcatttgattccatttatcttcatctcttatcatgtacaacttttgaggaaggaacaaatctgaagcacaatatatttatgtgtttgaataccataaagccaaaataaagcctcattaaccaattctttcagtggcattgtcactgatttttgtttgtgagcttcagtaaagcagcctaaacaacaatgccaggtctctagatatgtggcatgatataataaagtcaagtgagttattcttatgccacaatatcttatctacaacatgtaatgatgaacaaaattcaatgtattaaacacacctatgtatatatacaattcattacatatgtacctgatatattcatccataaacagatgcactgagttattattgatgacagtaaaatgaacacatttaaattgttcaatgtaataattttgatatctgcatacactaatggcactatgattataatcaaaacaataaatataccttaacttcaaaagctttctgtgatccttaaagtcctctctgttgtttatttttcaagatagtggttcaatttaaaaaataaaaaaaattatgaaatacagaagaataattgaaatatattttcaccagagctcataaccgatcattatatctttcctccaccacccattacagcacttcaggcgatgatgctgcttggttgattgggtaatcaagaagagcttaaccctgagggagatgaggcactaattttcttgccctattgaggttttcattattgcaattgctaattcattgttataagttggcagagactcaacaataaaacccctgtgctctagacatatttcattttgtagcaggaagtgtaactcctccaattaactttttttttttgcttttgcctgttattctgtggtcatgagaattccaaagttgaccatgaggcagtcttagcttctcatttcatggaaaccctactttcacatggtaaaaccatccctgcctaggaataagagctctagtgcaacagaccttcactttaccatgataggaagcacaattctccaagtgagtcactggaaatagtgagaagggccgatcttacttccatcttttgctttgtgaactcatgtattctagctatttaagatccaatgccatattctaccattagtttgatgacataacagtccctggaaaacagtaaacgagatttgctaagtattgttgtcaagctgaattcttatcttgtgctttgacagtctatcctgatattgtcaccctcagatgctgatgaggggtgtgctatttggtgggactaggggagcccatgatcattcatccatattgcaactcctttcctattaaatgcctcccttggtctgaggtatgtaacacaaaatctcctgtaattaaatcaggaggtcttctactggtgatgacagagatatcattgacaagaagggaaaacccatatcagatataggtgggagtatgcataataatacatttataatttctcaaaggtaaatgattctactgaaatggacttgacaccaagtagttagctggcctccttaagacatgctgggaaatagagagcagcataggtttctgtggttgataaattaagaactcaacactagcatgtcctctgggtgagaggaaggccacactgcagtgtccatacatcacactcatccttgaaatcttggaaactctgttcatggatccttcatacaaattctatgtgacaaagaagagagagtagctgacatccacctgttatttgtgaaataactcatttcaaatgatccttttccatgggcattgatacatgattcaaagacctacataccttttttcctactctaattggtccaatgctaatcctttccagactgttttgactccaacatttagtcttgtcctttctaatcccctaacttatgagctaagccattcaccactgtctgggagtccatacatctattctcatcaggtcatatacacatatatacagaattgaatatcaataatacagcttattatgaagtttttctaccattgatgtttgttagggtcactgttaagtaaggcaataatgtgtcagtgttttttttgttgttgctgttgttgtaattaatatattgagtcacaatgtttatgacctactcagaacttttgattcactctattaaatgaaggtaaatcatacatataagaaagatgtagactgaggagagaaaataggtcaaaagaggtagatgagggggccaggcgtggtggctcatgcctgtaatcccagcactttgggaggccgaggcaggcggatcaccagtttgagatcagcctgaccaatatggagaaaccctgtctctactaaaaatacaacaacaacaaaaaaattagctgagcatggtggcgcatctctataatcccagctacttgggaggctgaggcaggagaatcgcttgaacccaggaggtggaggttgcagtgagccgagatcatgccattgcattccagcctgggcaacaagagcaaaactgtgtctaaaaagaggtagacgagatgggagtttgagtaagctctttgaatagcttactgaattctcgggtgctgtttgaattacacaaaatatatcatttccttcatgttctaattactagtatccctgcttatctaattattttgtggatctgacaataccatacgtcatggtaaccaagctcagttacttaatctacttttagtctctctgattctactaggctccagttacatttcagaaactgttattaattggtaaatagttctctgtatcagaagatataaccttgctctagaatcttggtatctggggaaggttgtaaactttggctgtaaatttctgttgatactcttcctttaaaaaagtggagttcatttttccacccatgtgaaattgggatggctttgtggattgcataagccagtaaatgtgttggaaataatgctgtttctcatagtttgaattctcccggaaacagagcctgaaatggaggctagtgtgcgtgatgtttattaggggatgcgctttgtattaacatctacatagacaaggggaagaaagcaatgtttaacagaggaagaagatgacctgcaaacaacttactgtatctttagccgacctgccatggagcactggaactaaaatgtctttcagagtcatccttcatttagttaaaatggccaagtctttctttatgcccgattaccatcatttattgaatgtgggtgtccttgatggtaggttaccacaggtgcagtaaatatctgtaactgacacaacttttgaaagtgctcacatgggaaaactttttgttaacaagatttccaaccacaaggcaacatgttttttgaagaagaatatggacgatatattcctatgtccaccataccgtatgacttctcaggctatgctttaaaatctgtttgctggccgggcgcggtggctcatgcctctaatcccagcactttgggaggccgaggcgggcaaatcacaaggtcaggagattgagaccaccctggctaatacggtgaaaccccgtctctactaaaaatacaaaaaaattagctaggcatggtgggtggcgcctgtagtcccagctacccgggaggctggggcaggagaatggcgtgaacccgggaggtggaacttgtagtgagccgagatcgcgccactgcactccagcctgggagacagtgagactctgtctcaaaaaaaaaaaaaaaaaaaaaaaaaaaaatctgtttgcctccttctttttaattcttttgtaacactctttcatttattattatttttaaattttctgtattttatgattctttagcatgttggggccttgtagaccttgggaaaggctgattcccccagaattagctttttcctggacatagcaaacaacttacctgtgaatatgcctttgatatgcaaaccaaccgaatctgagttcataaactccatcatctgctttatcaggctcttgccatccagggacaatatctccctgccctaaatcagtccagcaccaagtactaggcaacgagggaccacccttataatccagagcccaccaaaattattcagtgtcaaattctaagcctacttaccattcctcaccctttccttcccaaaataaccacaatacaggttttcagccatgttcttcatttgctttttcagactcctaactgaccctggtgcctctccatgcggcctgcatggtgtggtattccccattcttttggaaacagtgagttacaaattgccttttttttttcttttttcttttagacagagtttcactcttgccgttcaggctggagtgcaatggcatgatctcgcctcactgcaacctctgcaccccaggttcaagcaattctcctccctcagcctcccaagtagctagaattacaggtgcccaccaccatgcccggctaatttttgtgtgtgtgtgtatatatatatatatatatatatatatagtagagatggggtttcaccatgttggccaggctggtctcaactccagacctcaggtgtccccctgcctaggcctcccaaagtgctaggattacaagcatgagccaccatgcctgtccacaattgccattttaattacagtaatctcctgatctgttggcctcaccatacctaaataaagtaaattctcatgtaccttttaaaataactctctcttcaaagccatcaactttttgcagaaggataagcaaaattattggatgatgagagaccatgtgcaatgagaaaggctccatgaacagaactgaagctatacagtcaatagcctgtactaaagccccatacatgtgagaaggatctcctgggacatttcagcccagctgaactcccagatgaaggcagtcccacagtcatcacagccaacactgtatctgccagccaatcctcagaagcatgaaaagtaataaacctgttttcaagaaactgtttgtgatgatttgtcatgtcacaataaattattactcaccataaacaaataatcagaaattagtgccacaggtagtgggctgttgtaacaaaacctgtaatatttggcactggcttttggaagtgctaataagtaagaacattaaaaaggataaggaagccgtaattgaaaactagagtaatagtaaactaatggttggtggagggtggagcaggcaaaaagaaattgctatttgacactgggataactgggagaaaagaagacacatgttacatgacatcattacctactgtagcacagaagatgggaaatgtattaaatgaacttattatatatgaagatatgttcaagtaggatattaaaaatgctgattggtttcttctattaattggcagagataaagataaactgaacattttacattttcaagcagaatctagaagacaattttgtaatgcagaacttgctggcttgcaaaataaaactttatcatcctcaacttcttcagctgggaaatggttgacaaattaagaagtgatctcaggcaaaattgaatttcacctaactggtctcagaacactcgagaagccgaggcaggtactggctgaaaggctttatgaacgtagatatggaatgccttcatatgctactggtttttctttttccttgactgattatagacttggtttggaaattctatagactaagataacacaattttgaaaagtgaaatgggacattaatttatagcaaaaaaaaaattctacctttacatcctcagagaacttctatgagtgaatttctccctctccacctctttctatctgctaaggcaagggtaagtgatctgattggggtatgcatgacccatggatgtagaacatctatctatctcacactccagcaggagcttatggcctttttgtctgcctgccttgtgtgttgacatggtttggctgtgtccccacccaaatctcatcttgaattgtagctcccattatccccaattgtcatgggagggacttggtgtgaggtaattgaatcatggtgaagggtttttcccatgttgttctcacgatagtgaataagtctcatgagatctgatggttttataaagggcagtttccctgcacacactctcttgcctgccaccatgtaagatgagcctttgctcttcctttgccttccaccatgattgtgaggcctcctcaaccacgaggaacggtgagtctgctaaacctctttttctttataaattacccagtcttgggcatttcttcatatcagtatgagaatggactaatacatgtgtttataagaaaggtccaggttttcttttcctatgagaatttcttcataagggtgagactgggaagcagggagccattccagattctctgcctataattgagaaataaggtcgccccattgtccaggctctattccatttagtttagatggcaagaggtaccatcataatttcaaactaactgatatcagagtttctgcgtgcatgtttcatatagctccctttagctaatcacagattccttatttactattggcttgaattatgaatagataaatgccagaatttagaaagcaaacctcacactactatggctcacaaaatcttgacataatctgctatttactttgaaaagagcaagatgggaatcaaactatgttaattgtgtatgtgtgttccattatttcatattaatttgctaaattattcattttatcctcctttgacattctaaatgccattaggtttggtttagctggagtaagtcatcactttggttcacagatctggatattaatatcttatctcataggttatttggtaaaagttatatatttttttcactgaacatttatccctttttaattttaatgtcattctctttcagaacatgtatgtccccatgtagtttattaatcaatacagggatttcaaaaaaaaatgatgggtgacaagagtaaggaaaggatatattcttcaggattcttcagagaaccagaaccaataggatacatatggatgcatataagaagatttttattgtggaaattgactcacacaattatggaagctgtgaagttccctgatatgacatctgcaagctggagaatcaggaaagctggtggtataattgagtctggttctgaatacctgagaaccagggaagccaacaagaaaaatcacaatatgaggccaaaggcctgaaaaatagggaagtgaggatatcactggtataagtcctagagtctgaaagcccaagtaccaggggtgctgatgtccaagggcaggagaagatagatgctccagctcaaggagacagagagattaagaactcgcccttcttccacttttttggttctacttgagcccttcataaattggatgatgtctgagttcactggtgaaggcagatcttcctcagtgtatggattcaaaagctaatctcttctggaagcactctctcagacacatgcagaaatagtattttattagctgtctgggcattcctcaatccaatcaagttgacacctaaaattaaccaccacagagaaggagaagaaagcttgagggagaggggaagatttgataagaaggacaaatgccaatgcttagcagtgagttattgattacagattcgtggctgctgcagaaaagttgtattggaaatggctccaagtacatagtgccccacttaccctataatcttccagatactttttcaagtaagaagatatgagcagaaccctttacaattttgctcttctttctttcaaaagcatttgaccatgtgattctgtgttttctctttgacttaattcaaattataactctagatatttttagtattaagaatttgagtttaaaatactttcctaaatttgataaaggtaatgtttctcatttgatccatcattttcattaagttaatttaagtattagaaaagggtgtgattctagttaaagaatttgaatccaacacttaatcatagtatacacaaatgagttaaataagaaggatgacctatgaatgaataaggcagtgaaagttgatttacagataattgttattaataaaatattcaataactttaattttgtgcagaagtaatatttataagtcatataaatttcattctgcataggtatcaattctttattttttaaaaaatctggactaatcaaattttgtgttttgtaatgaaatagacatcttacaatatttttaatggaaggaattatacagaagtgtaataattaaatgcagaagtaactattaattattttatgatataatcctgcaagaatttcctgtttcttgagaaattattgtgcctaaaactaaaaagttgaattaatttttttaagttaaggataactactataatcaagatttccatatactcacttttatacaacatagttttttttcttacttgtaagtagaaatgcatttagctttaaccatcccaggaatctaatttggtttctttttgttagaatttcttattttcttttttagcaatgaatacactagggttaggcatttgccttgattagagcattttaaatatgtaaatgctgagtaaaaacaagcaagatgttaaagcaagatgcttacaacaaatttcaatcacccaaaatatctcagatatacaatagactatattataatcttgggtatactattaggagataaattatgcttcatttccctaattaattgcattacattgatacaaaatgccaaacactaaatagtaaatattaagacagcatttgtaagtagtttaaagtaatttaaacttaattaaattgaaatggcactcaaagaacacaattattctgttcattgtgacatttaaatggtaatactcactataaaagtgataagttagatgaatgtttcccaactaaatcatgtttttaaattttaaatagacctataagcattcaaaatgaagattatatttgtaattatccatttcaacttctttgtgttattttttcctcatttttgaaaatgagtgatatgttcccacatttgttgcaaggatctcaaaataaatacttttaaattatttgaatagatataaattttatcttagcacttgctgaacacactctatcattcaatttaactctctcaatcttaaagatatgtaaagtgagggcactcaacagatttcctaaatacgaattacaaatgttgtaattcatgttaattcacaaatattaattcatgttaaattaaaaattctgaagttataaaattattttatcctacaaaaaattctacataacaaaaaaataacctgcattgagttattgcttttactcctaatattccttctaaataagctgaacccaagcatagtaagggactcagaggaaaaacataaaggttgggtgcaaacaactaaagtgagtctccaggatcaaaatttccagatattcccaacacgaagtgcttcccaggctgtaatgctaactgctatgtgctgaattattcccacctttcaaattcatatgttagtcctaacccttaggacctcagaatgtgactatatttggagatagggtctttaattaggtaactaaattaaaatgaggttattagtgtaagccttaattcagtaggactggtgtccttataagaagagaaaaataggacacagactgatacagagggaagatcacatgaagaaaagaaggagacagccatcttacagccaaggagggaggacttagtggaaatcaaccctgctgatgccttgatcttaggcttccagcctacagaactgtgaaaaaataaagttctgttgcttaagccacttaatcagttatgttttgttaagaaaggttgagaaaactaatacaataatgcataaaaaaactagataatatagacaattgattacagtattatctgtaaggaatccagccaaagtcagaggggtaataccaggatactacatcctcagaaactaccaggtagggtgatttgaatccagctctacataattgaaatgtgttcactaatgaaataaatattatatatcatttatatacacctacattgtacatacacacatgcacacatgtatgcaaatacataattttatacacaaaagtaatacataatatgtatatatttatatgtattttgtttatagttcatttatatttttcaaatatatattaaaatacaaacttcctttttttacccaattctacattctctttatttttttcacaggatcttgattatttccaatatttttcctgaatttattagctttacatagtctatcactatgaacaaaccttgatatctttctcccttccatttcaataatcatccttataagcaattccgccatctcaatacttttctgtttttttcttatatcggcattttgaattatcgaaacattacttgttttccacaaactgtgatgtaagctttcttcttttctctctttttaaatttcttttaaaaaggatatctactttaaaacttttaatagtataattttccctcaactcttcattttaatgaaacactgcaagataacacttttaagagcgaatcctacatttttaagcaaaactattttaaaaaatataaaatctcatccattttattcagactttaagttcacggccaacggaaccatttttttttttttcatatttgactactgtagatgaatctgtgagaaaaacctgaagccatggtcaaaaaaacagttatccaatatggcagaagtttggagataaactgaagaacgaaagctaagatttcctgagacagacaggactgtttctcactgaagatgaatacagtgttaacatatcctaggagaaacaggcatttggaaaatatttatctttaactgttcagtattttgatgcatacataggacccaaacagcaaatacacagacaagtaattagccatgagttagacagggatcttagaaattcatcattgtgctgaacaggtggaaaacatttaaaattgtttagagacactcgactactgcatcccgtgacacacgagtttgtgactgtcttcgtgtcctaaattgattttaatttcaactcttatgtggaaacgtactgcataaaaacattaattctctctataaagaatagttagtgaagaatattcttaaaacatccacaattttctaagcaatgccttaagctcagcattatagtcatcaatggaagtacttatataatttcaaatttttatttaaaaataagcagaaataatatgatttcaaaaatcaattttgttctgccattaaatgtctgattgttaattagtaccatttaaatgtgacttggtgtatattctgtttgtatctgcaatcaaataatttaattatcttctaaatacttgtggggttttttttactaccaattctaatggcaaaaaatgtaattttccttgagaaagtttgtaataaactggaatatattcataattctagaagaactaaaagaccttttaaaaacattctattaatgctaactataaaatgtttacctttaaaaacatggaaattcgaaattacatttggaaaagttattattgttaaaggaagcaaatttttcaggtagttgagtcaccttgacaaggatcattattacatcatttaaagtagaaaaaattatctgagctttttaaaataaaaacaattatttgctatttttactaaaacattgtgcagtcatgataccatataccagttccatactcaaaatatgtaaaaattatatataaggtttgctgtgcctatcattaagtcatttttgcttcgctccatttcactcctgtcagtctgtaagaagctttagttatgctcaacatatgtgaaaatcaagtttggaataattattcatgtctatgtttttattctctactaagcattatatatgttatattacttcatacatacaacacatgtagcatgggcaattttcttacttgtaccccttgtgaagactaatgccaatcaaatccccaacccatactatggttaaatgctttccattaaaaccaactgggagtagagcacaaacaataatgtcactgctttacgtttgtgtctcatttcccatctactttattctgccacaaacacattcctgttaagccaaccaatcaagatctacaggaaaaaagtataatttatgtattacaggcagccaccaagaatcctcctcaccctttaaaacaataactttgaacgaaatatatatacactaatgatccactgcctatacattaaacataatgtcttataattaaatattctcctttatattttttatgaaatccgagcgaggacaaatatcttgacaaaggctactgatcatagcatcagttctgtgccttactgcatgacgagttggtctgttataaaattatttctactgaaatcaactgcttaaatgaccttacctccaagacagttctgccatttatgtaaaaccatttatatctaaaaattccaactgggatcgaaaatagcaatttaactggattgtctccctttcattctttaaaatactctagtgtcatcatgaaaattacaattacgtttaagccatttttattatcactatcttttttagtaagtagtgacaaatcgaaagcactcacaggaaattgaaatgctaaaatgaattgaagagtaagccaatgcattttaagaaaatgctaacacagagagaaataaatcccttttctaaaagaaggatagtgaataaattacattgcctttatattggctttcagattggctttttagtctctcacatatccttttagagaataatataacatataaaattcagctgcatttctttttatcattttaacttgagcaaaaataactgctagtcattatcattttaattttcataaaattaaccattatgtttcctcaagataaagtggcagtaaattattagaatagtgctcctttcatgataaaattactctatttaattgtttaggtttaaaagttcatcatctttatcaaagggtctcttgtagtaaaagttaaagcaaaccttaattaatagttaatcttttctgtgattatgaaaaaatgctcctattcatatttaaattatagttacttaatgaaaacattaagattttaattctgattctttttggcttgaggtcaggacaaaatatctgtggagtggagagaatatggcaacttttgagctatattggtggcatgacctctcattattctcaatataaaataatcatgccattatcttctcactttatgtactactgaaataactcattgataaacaaatgtaaaataaaccttatgacctcaagtctcatacttattatttgtattaaatttatattatggtcaaaattcccttaaaacctctcttctattgcaaaggctttgaaaggtgttgatttatccgagccaacctataggacaaatgatccaggcttggatacgttgatggataacaaccagtcagaatcctcattattaacgatctactcctatcggtaagttttatgagcctcctgttatcatatggaacgaactttttgcagtagatgaacatgaggaaaagggacagagagaggctgttggatgaaaaaaaaacgaagattaaaaactctgacaatattgccaaggctctgtatccaaccatttctgaaactaatttatatatttgttaccttagaattgtattgtgttatttattattattttctttttatgcctgaaatgtttaatagtctgatagcatttaacataatctatattagattttactgtgtgctttgcaaatgattttgctatggtttaaatgtcttctccaaaaatcatgttaaaacttaattgtcattgtaacagtgttgagaagcatgacctttaagaggtcatttagtcataaggctctgccctcaaatggattaatgctgtcatggggagagtgggttcctgatgaaaggcaggaggcagaggtctgggggaaaatgccgtggttctcatgtccccttcaaaattcatattacaagttaattgacatcagaacagtgttgagaggtggtacctttaggagatgattaagtcatgaaggctctgccctataaatggattaatgtgatatcaccaaagtagattagttatgtcaggagtgagttactgttgaaaggatgaagtgcatttgcttgccttctgctatgagaagccacagcatgaaggccctttcaagactccagcatcttgatattagactttccatcctccaaaactgtgagaaataaatttattttctttataaattacttagcctgtggtattctgttatggcagcagaaaacaaattagaacagatataaacaaaactacaaaaatttatcattttcaattcaaacagtgaaattgttcacagatggtgatacttgacataggctttttcaagtgacagaccctataaacatgaacatagttgattcaacataagaactaagatggacagcctttctttctcaagaggaattgttgaaaatcctttatgtgctgaagataagccactaattaaactgctactttctgggctttgggagttatagttaggtaaacaagacttaaggaactatgatagagaactgtgaatgttgatgtgggctggctacttcttgtagtcttcagtaacatgaaaaagaaagaattccacagtccaactatgaaaaatagtcaggtaaacagttgaaattcattttaattaagtgtcatagaagtacatttctgaacattaatggtgagaattctgcttcttaccatgttatttctactcccgttttcaatcgtttcaactcttaatacaacaggaaccctaaaatgtgattattgtttcagtgtccttaaaaattaagaaagaaagcaactctattctttatacatataaaaactagcattattaagttttttttccaactcacaggataaatacaattcaatgactgtataaccagatataagaaacacaaaagtttaaataaaagttcttcagtggaaaacaaaaatagtattacactatgtatttttagaatctaagaactgacttcagcattgacatatttgtggcttaatacttcctaaattttatctcagtaacagctgtctttgaattctggcagaatataacagtatgaatggacattaagatcataggtccttttcgtaatgaagtgatgaattgccttatttctttttacttccttcttcagtatatcactttcagtaaaagttgaagactataataaattgacatcgtatttccaaaccctcttctttatactgaaggtcatttggttatgagtttgctagtaatttccaataagaggctattgtctagataatacttaaatttgtcatagagctttattagaggttgaattaatgttaattatgcacaaaacacatggcagctttgaaatacacttttaaaaaattaagaattgcattatttaaggcatgagtttattgtagttaagtatacattttaatttaatattaaatattctgtgcagccataaaaaggaaagtgatcatatcctttgcagggacgtggatggagctggaagccaatatcctcagcaagctaacatagaaacagaaaaccaaacactgcatgttctcatttataagtgagcgctgaacaatgagaacacagggaagggaactacacacactgggacttgttaaggaggcagggggagggagaacatcagaaaaaatagctaatgcatgcagggcttaatacctaggtgacgggttgataggtgcagcaaaccaccacggcacatgtataattatgtaacaaacctgcacgtcctgcacatgtatcctggaagttaaaatagaattaaattaaatttaaaaaaattctgaagtatgtaagtaatatgcagtttaactggatcacatctgaagttttaaaaaagtttgaatcacgatgaatactgaattatctttagaaaatgagaataactatctaaaatatattttaaaaagttaaaaagttaacaaacttgcataaaattacaggtccgtacatttagcaaatccacttacacaagtagtggttgctgtctctctcccaaccactccaaaccagcaaggccttaatacaagaatgagactctgaaaacaagcaaggattttaatcttgactccatcacgaaatagctgtgtgaacatgggcaaactgctttacttctgtaagcagctttgtctgaatattggtaatatgattaggaagaataaatgagatagatcacataaagaaagccatttttactttgccttggcccagtatgtacccctacatatttgctgttctagtttctaatatgattattattatagttactgttataaatatacacccattactaaacaaacctaaaatacatacattccagtgatataccactgattttcaattttggtaaaggtatgtttattaaatatatgatttcatgaagccatctgcagtttatggattgcttactaatattactctgttagttaaggttcaatgcccttttcaaatttacatgttcaaaatcagaaatatttgtaaatatatatgaaatcatgtataaggaaaaagacttaaaatgtgtttggaatcctgactttaccacttcctagctatgtgagcttaagcaatcacctgaattctttgagcttggggcaccctacacactacctacacctgagtgtagagatgacaggcattccttttttgtttgtttgttttcagaaaccctgtttagataagtaatctgagtgcttcaaacccagcatacctaccaccctgtggcagcccagtcttgcactattcgatgcatgaaatggcacactgctcattgagagtgatcagtttgccaggctgctctccggaaatcagggaccagtcatcaggccctgggatacccctagaggcatgaatctcaaagcttatgagagcatctgagatgagttgagagaggatgtgcgggagtcagagtgcctgaaggagagacatgaagactggagactgggcccacacaggaatcagcctgggctcaggactctctacccacaaaataccctggtcttcaactctgtcaggtaccaaaaaggaccttaaattgtttgcaagaagacactcataaatatggaattctgtgaggtttgcagcccaaagtaggaatcttgttgtctcagatatgtgatcagtaatgctcctcagctataaaatgataaattaatatctcattgaatagtacataattgtgggtttcaaagatactgtctgcataatgctccacacggctcctgacatacagctgtatagtgataagaagaaatagtttcaaaacatgaagctatttcaagaatcaaaagtagaagccagatcacaagttcacaaatcttgtatattatctcttgcttaactacagccctgtactgatttatttataaagagctctaatggggtcgggctcagtagctctctcctgtaatcccagcactttgggaggcagaggcgggcggatcaagaggtcaggagattaagaccatcctggctaacagggtgaaaccccgtctctactagaaatacaaaaaaagtagccaggcatggtggcgggtgcctgtagtcccagctactggggaggctgaggcaggagaatggcgtgaatcccggaggcggagcttgcagtgagcctagatcgagccactgcactccagcctgggcgacagagccagactctgtctcaaaaaaaaaaaaaaaaaaaaagagccctaatggttgaaaactccccatggactctgtcaatacccaaatacatttaaaaaaaaataaactccaaatattcttctgaaaaaaaagaaaaacttgagaatttggaaatcgtaagtcattagttcttgaactgatgtgtgcccgaatcatctgaagagattgttaaaacatagattgttaggacgtaattccagagtttcttttctgtaggtgggactgaaatttctagcaagtcattaagtgattctgatgctgctggtacaggcatcacactattaggaattattctgatgattgtaccatggctctgaactgtcttttctgtttgttaggtcaagtctaaatttatattctattcaaggaatttaggaaaggcatatgcccacatagcagacctccaaaatgttttagaaggtaatcgtctctggcccctgctcatcatcattcttattctattgcttttatttccagtatatatttgttgttatataacatttcatgcacacaaaaccaaatgttaccattattcctctttcttgaattagattgactataaaaagggcatgatagctgaaggagatcaattcatcaggagaatatgactcttaaatttatttatttaactcactgttttgggagttctgaagcatttgttgacctttctctctcataacttcacttatattatcatcattttattatatgtccttttattaattttgtgatatagtttgaatagtatccacacccaaatgtcatgttgaatcataatccactgaattgaagttggtgcctggggagatgattaaatcatgggggtgggtttcttatgaataaattagcaccattctcttggtgctgtcctcgtgctagtgagtgactttcatgagatctggctatttaaatgtgtgtagcatttcgcgctctctctcttgctcctgttttcaccacgcaacatacctgttctctctttgccttccaccatgattggaagtttcctgaggcgtcctcagaagcagatgccactatgcttcctgtacagccttcagaactgtaagccagtaaaacttcttataaattacccagcctcaaatgtttgtttattgcaatgcaagaatggcctaatacattttataatcataagtaaataaatataagtaagactactatgaaatattttcaaataaaataacttttccactaacattgtgacaaacatttgggatcatagatgtttttaagccaatatattccatttctgtatgtgtcatgctacaagcatattttacttaaatgccaaataaatatgcacatgttaccaatcatgagatttggggagggggtagttaagtaataagttgaaaatactataatgattttgtggtgatattttatataaaaatatttttcttgagaacaagaatagttggattattttaaaacaaaatgaaacaaaaccttggtatttcttataacaaacgaaatttgagacaacattttatgctgggcatggtggctcacacctgcaatcccagcacttcgggaagccaaggtgaaaagattgcttgcattcaggagttcgacatcaacctgggcaacatggcaaaatccatctctacaaaaaatacaaaaattagcctagcagatggtgcgtgcctgtgtactagccactcgggagagaggctgagttgggaggatggcttgagcccaggaggcttgagcctgggaggcagaggttgcagtgagcccagatcttgccactgcaccccagtctgggcaacagaatgaaaccctgtctcaatcaacaacaacaacaaaaactcattttatttaataactttgttacagaattaaaatactcagtggatatttggggatgcctttctaattgtctgttcccttttcccttctcccagatctccagattctttttgaggttcatgtgagtctggaatattgataaccatccatcacacaccagctttgagtatgtagttaactaagccaaatcaccatacttcttccttctggctatatgaactgtatcctgactcaacaaacattttaaattaatccaaacatagtgcctctcagggtttttgttagcaatgctataaatgacagtctttcttgcatggtataaaggtgaacgcatataacctgagatctgcttgttatgatttttccatcaaaaggaaagccactctgaaggtgaagccaattgtagagagtagcaatcagaaattaggtctagtgcaatagtactgaatcacgggacagagacttacttgaagctaacctctatttgtaacattatgagagccaagatactctttattggtttaatttgcttgatattacttgcaaattaaaagatattttatgaaacgttatacgtgacagtataacaaataatatagatcttgaaaattcaaagtgtgttctatataaagtctaactatatgtatatatttatttaataagaaattacatacataaaagtaaactgtgcatatttgctgcatttagaaaatatatctgaaattcaagtctttccacatgaaaacttctaaaattatttggattggcttgtgtaatcgaagtcaaatagaaaagcacagttaacataaactttcaaaataaaaacaatgtagaatctgtgtaaaattatcagggacctaaatgtgagattatatgcttatttttcactttgaagattttaaaagacatcacatttcattaactgtctgaaaaggagtgcacaaaaattaatttggagtagatgttcctccttgctattagctaactgaaggttttgcatcaagacgctgagatgatatctttaaaccagatactttttgattaactaatttcttagaggtttaatagataatccagtaaagtagctgctaagattcagtatgccaaaagaatctaatgggagattctggtaaaaattcaaatttttggttccatgtccttagaaattttaaaaaagaatgtctgtagttctctcatgaaatttgtaaaagcagcttagatattttaaatgcaatttttctggaggaccataatctgagagacatggatctagaagagcaaatagataacatgctgattattttagcagatctgtatgccagggttcattccatcaacttacaatctaatttcatttatttgcagatataaatatacgtacacataaaaagaaggatacagtaaaaagtcatggcaaacacttcagtccttctccacagatacaatcattattgataaatttctgtgtacattttggaaacctgctatgcatataaactcaacactcacttttgtaagtgatcatgaaactacatcagggtgaaacattcttattcttaagatgaaggcagaaataaactagcagcatgcctttgactccaggatacactcaccaacctgacatctgtaacagtagccatttcctctcaattataattagcaatattcattgcttcactgaacagagttcccaactaatcatgactgactacatttaaaataccagtttctagaatggaaacttagattgatatttgaaatgtcagcttctatttgaagaaatgatagctgacaaatacaagtaatgcatggagagtagatgatgaaaattatttaaatatatacagtagaaaagagataatgactccttttgctatatgcactagatagcattaggaggtgaactaatagaaaagtttttaatttttttcttatcttctcatgattaatagtggattcattctaaagaagctaaggaagcacttgtcagaaagttggtagaaccagctcttaaaatcgactttgaaccttgccagtcatgtcatcgtgaccaagccacttaaatgggtagttctatagcatccttacctacaaaataaaactaatcatcactgacacaatttctagctaaaaacttgttttgatcctgaaataggcctgtgtttgtctcttcgcatattgtgtttctgtgtctctctcacaaactttgagttggcacctagcccctcttctcatttcaccttttcttgatttctctctcagaaaaggtcttggcattttactggggcattgaactgtgggtgaatatgtgctcggaaagagaggaatttatagatcaaagctggataattttttttttttttttttgagacagagtctggcactgtcgtccaggctggagtgcagtggcgcaatctcggctcactgaaagctccgcctcccaggttcacgccattctcctgcctcagcctcccgagtagttgggactacaggtgcccaccaccacaccaggctatttttttgtatttttagtaaagacggggtttcaccgtgttacccagggtggtcttgatctcctgacctcgtgatccgcccgcctcggcctcccaaagtgctgggattaggataatttttaaaaatagctttattaagatgtaattcacacagtatacaataagcccatttagagtacaaaagttagtgttcttgaaaatatattcacagagttttgtaatcattgtcacgatctattttagaactgtcttaaacacatgaggctgctataacaaaataccatcagcaaagtgacttataaaaaacagaaatttacttctcacagttctgcaccattcaatattcataccaggagtgatggagatttccaatatctccacatctgtgttaggccattcttgcattgctataaagaaatacctgaggctgggtaatttatgaagaaaagtggtttaattagctcacaattctgcaggacagaaagcatagtgctagcatctgcttggcttctgaggaggcctcagggagcttttactcatagcagaaggtgaaacaggagcagaaacgtcatgtggcaaaagcaggatcaagagagagcaacatggggggtggaaactaacatactttttttttttttttgagacagagtttcactcttgttgcccaggctggagtgcaacggcgccattgccactcactgcagcctccgcctcctgggttcaagcgattctcctgcctcagcctcccgagtagctggcattacaggtgtatgccaccacaccgggctaattttgtagttttagtagagacggtgtttctccatgtcagtcaggctggtctagaactccgacctcaggtgatacgcccacctcggcctcccaaagtggtgggattatgggcgtgaaccactgcgcccagcactaccacacacttttaaaccaacagatctgttttttgttgtttttgttttttgtttgtttgtttttgagatggagtcttactctatcactcaggctggagtgtagtggcaacctcccccaccctccccacccccacgttcaagtgattctcttgcctcagcttcctgagtagcttggattacaggcacccaccaccacgcccggccaatttttgtgttttcagtggagacagcatttcaccatgttggccgggctggtctcgaactcctgacctcaaatgatctgcctgcctcggcctcccagagtgctgggattacaggcgtgagccacagtgccagaccaaagcaacagatcttgtatgaattcagtgtgagtgctcacttatcaccaaggcgatggcccaagccattcatgagcaatctgtccccatgatccaaacatctcccaccagacctcacctccaagattggggattacatttcaacatgagatctatgcagggacatacattcaaactatatcaacatattcaccaatacttttaattaccttgtggctctttaaaaaaaaaaagaatcatagcctccctagtgggtatgagatgaaatctcattgtggttttaatttacatttcctcatgtctctggtattgagcatcttttaatgttttggccataaatgcttttatatcttttgtggacaaacgtgtttttagaccctttgcccatttaaaaaaatcggattgttttttcttttcttttttttttttttttgagatggagtctcactctgttgccaggctggagtgcagtggtgcaatctcagctcactacaagctctgcctcctgggttcaagcaattctcctgcctcagcctcccaagtagctgggactacaggagcccgccaccatgcctggctaatttttgtattttttttttttttttttagtagagatggggtttcaccatgttgaccaggatagtctcgatctcttggggttgtctttttattatagagttgcagaagtatttttatacaatgtagaaagaagcttcttatcagatagatacatgacttggaaacattttctcccattttgtggggtgtcttttcactttcttgataatgacctttgatggtatccaacctatctattttattttttgttactgttgctttagatgtcctatcttcaaatctctaacctaaaaatccataaatatttcatcctatattttctgttaataattttataaattaagcacatagattaataatttttactccttttgaacaaaattttatgtatgctatgtggaatgtgcccaactttgttcttttacgtatggttgtccaaaagactattatttcccttatttatttgtcttagaacccttgtctaaaatcagttgactgaaaatgtgacattttatttcagaaatctcagttctgctccattcatctctaggtttaccttctgtcagtgaaatactgtctcacttaaagtagctttgtctcaagtttcaaaatcaggaattgtgagttctctaatattgtttttcaaaatagctttggctattctgagtaggttgaatttccatacaaattttaggatcaattttaatttctgcatttaagacgactggaattttaatagatatttttcaatttagagattatttctattttaactgagtcttctgatctatgaacatggaatatttttcaaattacttaactcatctttaatattttttctaccacatatcttagttttcataatataagtttaatacttttttgttaaatttattcctgtttaatgttttttcactattaaaattaaattgttttaattgcatttttattggtattgtgtaaaagcacaattgggttttgcatgttgatttggtatcctgcaaccttgttaaatttatttattggttgtatctagtacattcttaaattaactacttagaattttctatatatacaagaagaaattcaactttgttatggtataaaatccttttcattcattactagattgctagtatttttttgagtatattttgtttgcttatatttataaataatatgggtctgtagttcttttttcttgtgatatctttggttctgacattaaaagcttctgcaaaattgttctgtttgtaattgacagtccactgttaaagtgtccaactattattgttgagttgtctatacttcctttcaatttgttgggtattttatgcattcaggggctctctgaggtgcatatgtgtttaaaattgctatatcttcaattgtagtgatttttatatctttataaaatgttcttctttatctctagtgtcatgctttgctctaaagtctattttatatgaaatttgtaaagtgattccaaatgttttaaggttgctgtttgcatgatatatcactttccatcctgctactttcaatttatttctttatttgaatataaattttgcatcatatggacagaatatagttggagctttttaactctctagtctgacaatttctgcattttgatgagattgtttaattcattttcatctaatgttattatagatatagttggatttgcctttgcattttagtctttctatattttccatatctttttttgtctgtctattcctcctttaatgctttctttttccattaagtgaatagctgccaatgttacatgttaattatttcaacaattttttcactatattcttgcgttaactgcttagtggttacactacaacttacaatatactttttttgagacggagtctcgctctgtcgcccaggctggagtgcagtggtgcgatcttggctcactgcaagctccacctcccggcttcatgccattctcctgcctcagccaccccagtagctgggactacaggtgcccgccaccacgtctggctaattttttataattttttaagtagagacggggtttcaccataatagccaggatggtctcaatctcttgacctcgtgatccgcccgcctcagcctcccaaagtgctgggattacaggcgtgagccatagcgcccggcctacaatagacttcttaacttacgagaaactacttcagttttacactaactttattcttgtgagacatagaaaaggtgttcctctataaccctatcctctctattgtctttttgtgcttttccttttacacatattgcatctatatatgttataagcccaaaatacattactgtaattattactttataattttgtatctgctaaagaagttaagaaataagagaacaagaatatatgcatagtgtttgttatcttaatcttatttattttctttctccccatttgtttctgtggatttaagtagtcatgtgaagtcattttcttaactcaaatgtaactttgctcccacctgtcttagttgtgctgttattgccaaatatattacctttttgtatgttatgggcccagcaatacagttgtgtacatattgttttataccattgatttttaaatcagttgagaataagaaagtgtaataaatatgtatctgtatagcgttttgtagttatatagttgctatgactattacttgattatctggtatgaattggaattaccatatatggtcacttgttagcctgaagaacttcttttactatttattttagggtatatctgctagcaacaaattctctcagaccaacaaagatcccgtgactctggcctgctgttcccatattggggcatgtgaactcatatttgatgaataacagagtgggacacgtttaacatctctcacttatcaaatgagagtggtatattcaagaacatggaaagcataggtccagtgacatttgagcttttcatgaaaaattaaaatattttttttcagttttttggagagactgtgctcctctgtacagtcttcagcagtatcaagttggaagctaagtggggaatgcctactttactcaatgggtagaattcaaggccactgtcaacacctggtcaataatcctcttgatgaatcttgtgttgtttttagtgatggtgttggggcttccacttggaaaaccacagatgggcagctggtgaaggtgcactgctcaattcctcccactgcttctgggatccatcaccgttccaaacatgtcagcatatctaccctcacagaccagacgcaaagcacaggactgtttctgatgcagagtctactactgcttaccagctttgtaaatctaaaagatgaactgtttgtttcctggaagaatgcagtttgaatagagtggaggatgtatgaaacatttgtgaagggtaattttttgccttccctctatgatgaaactgggaacattaacatttcagattccaattgtaagtatagtgggagggcaaaaacttcaggatactaataatttttacctggcatattgtgtgtgaacagagagaatgaaatagaagagaatattggggaaatgtaatcatatgtcattcatcataaagcctgctaatagtagaatattagaattacaattaagtagctttcttcttctcctccagccctcttctgtcccttgctttgggattctaaagcaagagtatatttaggataggaacttcctctgacctctgtgctggatgagttggtggttttatatatacagatttaccctgaccccttccccccaaaaaatgatatcaatcatattaattttgttttcttaaaatcgtgttatgacttttcataagcacagttgttttatgctgttaaatatataagatcagtccttaaaacagatcaagatgtaacataatatagttctttcataacagatccttactaattttctcaagtattctctgttgtccctgccataaaaattttggcctaaaaaaaacgaacaggtggtgtgacagtaagaagccatgtggatgttaatatgacattgctttctgcagaaaaagagaaaatgctttcaaaatttcaggctgccaatcgatttagctggcacctgccgactaaactgtcacagtattttaagagcaggcatgttgccatcataacagatggttatgtgtattgatagccaagtgatcatgtatgtacattggttatgagtgttgaaggcaagctgctcagttaagaaggtcaaatggcagtcagtccagagcttccacaattaatattaacagggatagctgtcaacttatcatatcttattagctattgccttatttacctcttgaataattatagagctacaccaatgagatctttatattgtaatgaactgattaccatccaatggcatagcagatgccctgaatccagtacagaaataatttcaatagcagaaaaattaaaagtgcatatataaagtgaatggatattttggtcatatatttagggttttcttttttataaaaagggatttgatgtgaaacatttctctccaaactttctttcaaattttaaacaaggctgtctagcaacctcttacataaataagaattgcttattcattttgcgaagtcactgcatggttaagaatctaattcaaggcaggcaatgcttgattcttcccagttattttttccattcacataagctaacttcaaactacaccgacttatcctgacctctttcaatctatcaaccttaaatatgacactagtctataattgtgtatttattttgtttcaaaaaaatttgctaagaatcagggaaaaaacaaaacaaaacaaaatacctatttttctcctgctctttagtagcttgcaaccaaagaaactaacgtttttagtgaagaagaaaaaaatgaatgtacaacaatgtggtgttgagctcataaaatgaaaccccaaagtatggtgctttggcacacttagtgctttaagctaaaggagactggaagggcctcagatgcaagaagttctctctgctcttttctcatcctcctttgttcttcccccattgcttccttaagccgattatagaaactagaattcctcttccccaaagcaagtcataaaggcgagagaggacactttctgacctgccttccctgaaaatgggccataagaccctcattctagcagtggcctgctccatgcctggggggaagaaatgctacacaaagaggccaagaattccaacaaacgggccttggtaagtcttccgtagtctgtttccactagcatagactttttgttcaatcacagttctacatggctttctattcttcatcaaacctacgcataaacatacaatgtctgaaggttcccatgtcacataaaacttttattaaataaatgtaggccgggcgcagttgctcacacctgtaatcccaacactttggaaagcgaacacgagcggatcgcttgagctcaggagtttgagaccagcctgggcaacatggtgaaaccccatgtctacaaaaaaatacaaaaaattagccggtgtggtggcacacacctgtagtctcagctatttgagaggctgaggtgggaggattgcttgcacccaggaggtggaagtcgcagtgagctgagattgcaccactgcactccaggctgggtgataagcaagatcctatctcaaaaaaaaaaaattaaaaaagcttttaagaattaaaaaaataaataaatgtgttatgctgttctcttgttaatgtcttctgttataaagatgttggctctggactttaaatgggtgaggaaaaggtattacaccttttcacccttatgttgttttagtgataaacttaatacaaactcagaaaacaaggggagtatgtggactctctagaaaaggtagaatttggaaatgaaaatgtaagaactttttatcagatgaagggaaagggagtattttccagtgagggaaaacagcataaaggtccaatgagctaagtgtaatagagtttaaaacaaaaagaaaatagaaaaaactttacctcaaatgagcctcttataattttcttttttttttttttttttttttttttttttttttttttgtgacggagtctcattctctcgcccaggctggagtgcagtggtgcgatctcagctcactgcaagctccgcctcccgagttcacgccgttctcctgcctcagcctccctagtagctgggactacaggcgcccgcctccatgcccggctaatttttttgtatttttagtagagacggggtttcaccgtgttagccaggataatattttgtttgaaatctaatcagcttgctaaagactggcatttgatagattgcctaataaatcttagaaacaatatctacatatgcatggaaggggctatataaggatatacatatgaaagaagatactagtctgcttcatcagataaaatatgataataatattggttaaataagtttgaatacattatgataatggtaattacataataattaacatttatttggaataatcagtatgctaattgcttcatatgcatcattacacttaatacctgtagcaaacctacaagatacttagtattctattcacagtttaataacagcatggcacagcttagagaagttaaactactggtacagagccttacttaaatgaaagaatggactgtggattcaatttcaagattgcttaatttcaatgttcatgttcttaactactacatgaggctggagaaataaggacaaaattcaaaactaagtaaaacagttttaaactaacaatcgtggaaggatagaaactaaaggattgaaataccagaattttaatcatagatctgccactttctaactttgaattttttcctagcattgattttgacttttctaaaataagggttgtttatttcagggtctgtttcttccctgtaaaattctacaattcttgaaggacatctgatgttgactttctgagagtggtatattaggaatttatgtatcagagttttagtttatgttatagattgaattagaggttacccactacgtcacattacatgatgatttctttaaccaccagattttaaaaactagtttttagaatgtgaagaggctcgcatatatatgtgtgctgatgtgagcacagaagacaggagctcgaagttgcagaataagcaagaagggatagctctgttccgaaatgtgagggggctcagagggacattacacttttatttatttatttatttatttatttatttatttattttgagacagagtctcgctttgtcacccaggctggagtgcagtggcacaatctcggctcactgcaacctcggcctcccaggttcaagtgattctcctgcctcagcttcccgagtagttgggactacaggcgcctgccaccacacctggctaattttttgcatctttagtagagacagggtttcaccacgttggccaggctggtctcgaactcctgacctcatgattcctcaaggcctcccaaagtgctgggattacaggcgtgagccaccacgcctggccaggaacaaggacattgcatttgtacagaagaggaaaaaaaaaaaaagacatttgtgcctggttacccagaactagaattcctaatcaaattattgttattaaaaataatgtggccattaccgatgcttatgtaatgtcattgcaattttggctgctctatgtaaagtcagcattatattaagaattggagaaactaacaagagattagaatggcgaaaggcaggctaggagaaggcttttcaaaatttaaggtgcatagggatcatgtgggaaccttgctaaagactatactctgattcaggagaacttggatgggccctaagattctgtatgtttaaggagttcctaggtgatcctcatgttgccgctgttgagccacacttgaggcagcaaactgctgggagtctactacagccatccaacactgagatgcgaagggcttgaacagggtgataggattagagtggagagttgtgggtaagactgaaaggaagaggaatgatgatgtttaaaaaaaaataaaaaagttaacctatggtgtcagaaatatttgtttataagaacccatgcagtaaaattataactctagattttaaagcacatttatgtatttgctgttattgagaatgacatccactgagtacaactgaaagagtacataggagatgggttttacccatggtttcaatgaattcgaaatatcctaagatgatgtggcttggctgtgtgtctcctcccaaatctcatgttgaattatgatcttccgtgttggaggaggagcccggtaggaggtgattggatcatggggttggatttcccctttgctgttctcattatagtgagtgagttatcacaagatctggttgatttaaaagtgtgtagcacttccccctttgctctcgttcgctctcctaccaccatgtgaagatgtgcttgctttccctttgaccttctgccatgattgtatgtttcctaagacctcccagccatgcttcttatttcttaaacagcctgtgaaactgagccatttaaacctcttttctttaaaattacccagtctcagatagttctttatagcagtgtgaaaacaaactaatacataaggtatcttattaaaaaaaaaatgtgagtatgccaatgatctttaaattccttgaacatgaaacaggattcttttgtgtgtgtcaaccaggccctatttttctagggaacctcggcaccgtcagtttttttagcttttcacttggaatgatgtgtttgctctctatttagactcacaggcaattttgttagtttctgcgagattcctgcccacactaactcaacatttgaatctgcacagctagtcctgctatttcttcctaaatactagatctacaatcttggtaacattaaccaggtgaaggggttatatgtattcttagggatcgatgagctagatttctacaataatttaacaatttacaggaaataaaccattgaatcaatgatactgggtgtgtcttgtgcataaaataaccacatcaaaataacaaaatgtaacatataacagttaattcatcatcaaaaactgatattgtataatttggtgaacagtcacacatttgggaagacttaagaaactcagaatgatgggcatgtttggactttgcatattaaacacaaattttaaataacttttgccaaaataaaactttctttctcttcttcaagcagataatactaatgtttcctaacatatgaagttgttggtgtttacttgacattaattgttgcattactttcttgtctatctcctttccttcttcttagagcacttaggttaggaaatgtgtaatgttaaattctttcttcatccctttgaaatgtaaatcttttgaaaacctctcaccagttttacaacccaggactgtctttctcaaggacctgggagctattcctttgaaagtcatcatcagggaaaatagtatcccatcttcctggctctgtgggagggtaggagcctatagtcagcctaacttggagcttaaccacctcctttcaagaagttaggagaaagtttacttttcttgtttttaattaattcattaattttaaattaaaaaataaaaattacatgtatgtatcatgtacaacttgaagttttaaatatgtatacactgtggaatgactaaattgagctacattatgttagcatatatattaacatatgcattatctcacaaacatcatttttgtggtgagaaaatgcatcacaattgcacttgtaatctactttcatcaattttcaaaaatatgatacactgtaattatataataactctatataaatatttataactttagtcaccgtgttgtagagtgaagctcttgaaattattcttcttgtctaactgaaattttgtatcctataaccaatatctcctcaccccagcaccgaacccccagtccctggtaaccacattatattctctacttttatgaggtcaactttttagattctacttatgagagagatggtgaggcatttgtctatttgtgtctgacttttttaaatatacttagcataatgtcctccaggttcatccatgttgtcacaaataattagatctccttcttttttaaggttgaatagtattattccctatgtacttttcctttgggtaaaaccaattagcaaacatagagaaaacacatttgcaaactcaggaataacttaatgtgctggatacatcccattgatcaacctcccatcaaaagtcctccgatacttttccactagctccactgagcatttacaaatgctcctgccttttgcatttcagaactgagtatccaggcctgctctgtgctctcttccctattgctggcaatggtccgggaataatataaatttgtttgctcatcttgttctatttttttaacataccagataatgtgacataaaagaaatatattcacataagatttctctgataacaaaatctaaagaatataagagattatttatattaattctacatcctgatattgtgaatattctaccaatgagacatattttttcttgtaagtgatctctatctgagatatttctgtatttcttagttatggatattgtctatttttgcattttactaatatagagagcttaaactaatacacataaaaaggtatgaaagtttaaaaaaaagatattctgttttcactatggttgaaaagtaaagtagagcataaatattgggctatattcctggggtctccattttattgcatggatctacatgtcattcatatggtggtaccacaccgtcttggttattgtagactttttataagctttcaaattgtgaaatgtgagtcttgcagcttttttctagtattccaggattgtttttcttttttctttgagacagagtatcgctctgttacccaggctggagtgcagtggggagatgcccactcactgcaacctccgtctcctgggttcaagcgattcttgtgcttccacctccagagcagctgggattacacatgagcaccaccacacctggctaatttttgaatttttagtaaagatgggttttttccatgttggccaggctggtctggaactcctggcctcgagtgatctgcccgcctcggcctcccaaagtgctgggattataggcgtgagccaccacacttggcctccacatgaaattaaagataagtttctatgaaggcatctgaggttttgatagagattaaattgaatcagtaatcaagtagaggaatgttatcaatttaactattttaaatctccattccatgaatatgggatttttttccatttatttaggtcacctttagcttatttaaaattttgtttttagttttcagtgtgtaaggtttgcaattttgttagatatgtcctaacatacagcagattcccttgaataatttttttcttcattttctttatgtctttaggacagttttcatagactttgaatgttttcaatttttaataatttttaccagttgttatatcattgaaaagggtctgggaacagaatgccatgactttttgttttatttaccaaagtttcatcctataatggccaatttcaaaggtcagcaaatgcattaaaggtaaatttcatgcacagtttggttcttacaccacttgtgatttctctaccctctgaaattgcattattttttgtcaactacatttcaaacctgtttcttcagtacagaaagacactcatattttctgtttcatgtctgtgcacttttctgcaaattgaaaattccagaaagttcactttaaagatatggctatttatgttcagcctttcttgattgttttccatgtagctctccttttcttcttcctgctccccttccttatcttctttaatttcaatacattcccaaaattacacaatactttcaagggtggtataaataacttatctttttgaaccatttgagtgtacctgtccaacatcatgtctgatcactcccaggaacaaacaaggacattctcctatataaccacaatatcactgcctctttccatcacagttttagatttcaggtgaccttgagccttcaaaggcctttgggtaagatatgtattaagctgtttatccttagtgggtaatattctcaaacacttcatatatgactaagcaaggtaataaaacaatgaaagtaaacatttaggggcaagtatcatagagaatagtgaaaaagttaactccttgaagagataatcagtacaaacaaagaacattcaaatgagaacattaattatgttggcctttccctgtcccatcattgcacattggatgtgagtaggccaaaaacattggttttgtatgatctagccttacttatcaaccttttatggatactactacatacaacccagactctctggattttaatttcaagaccaagcataatttcaattttgtgttatctctcatggaacagggttaatgtagtctacatggagaaagaaagaagaaaagttttccctccatcccctcacaggtgtgatgattaatattgaatgtcaacttgattggattgaaggacacaaagtgttgtttgttggtgtgcctgtgagggtgctgccaaaggagattaacatttgagtcagtggactaggagaggcagacccaccttcaatctgtgagggcaccttctaaccagctgccagggtggataggataaaagcaggcacagaatgtggaaggactagactggctgagtcttctggcctccatctttttcctgtgctggatgcttcctgacctcgaacatcagactccaagttattcagcttttggactcttgggcttacaccagtgggttgccagggactctcggaccattggccacagactgaaggctgcactgtcagcttccctccttttgagattttgggacttggactgacttccttgctcctcagcttgcagatggcctattgtgggacttcaccttcttatcatgtgagtcaatactccttaatatattccctttctatctgtctatctctcccatttatcctattacttctgtccctctagggaaccctgactaataaatacaacaggaaagacggattacacgttagaaaccagcaccctgcaaatatatcatgtgttttctcacattactcaggcctttttcacttagaaggccaagtgaatagttatgagttaaagtgacatgtgttactttgagaagcctagagtaatcagcacttatttcttaaacagttttttcctcaccttcacaattaaaaactgcatgtattccaggttatgctactacaaaataatggcatatttatcagcctgagtataagagattttgtttctattgctgtgcaacaaatttccacaaacttcatggcttatagcaacacatgtattttggttatttactcttttgtttgtgtatatgttaatttgttttatttttatcatagcatccatgggggaaaagcttgcataggtcttacctgagtcctctactcagtatatcactctgactatgttgaattttatcacacactttttcatcctctattgaaataatcatgtaattttgttctttattctgctaaatatgttatatcacattaattgatttttgcatgttgaaccatccttgcatcacaggaatgaatcccaaggtaaacaaatggccatggtatatgatccttttaatgtgctgctggattttgttttctaaggttttgtggaggatattcacatctatatacgtcagggttattggccaatagttttcttttcttgtggtaccttgggctttaatatcaaggaaatgctgacctcataaaataagtttggaagtattccttctcctttaatttttaagagtttgagaaggattgccaccaattctttaaatagttggtagaattcaccagtgaattcctatggtcctggactttttttgagagctttttgataactgattcgatttttatgctaattataggtatattcatgtgttttacttcttctgaacttaatagcaatctacagattcaatgtaatccctattagactaccaatgtactgatgacatttttttttcagaaatatagagaatatttctagaactcttatggaaccacaacagatcataaatagtcaaatcaatcttaagaaagaaaagcaaagatggaggtgtcacattttctcatttcaaaatatgtttaaatctataataaaaacagtatgatactggtataaagacagacatacagaccattagaaaagaatagagagatcccagaaaaaaaaaattgacacacatacagtctactgatttttgacaagtgttccaagaatataccattggaaagaatagtcatttcagtaaatgatttgaaaactagatattcacatgcaaaaaaagaaaataattaaaaaaagaaattggacgcttatcttataccatgcataaaaatcaattcaaaatggataaaatacttaaatataagatctgaaactgtaaaactcctaaaataacacatatggaaaaagcttctcaacattggtcttagtaaagatttccacacagcggaaataaaagaactcctacaaatcaatagcaaaaatcaaacaacctgattaaaaaaatgagcaaagcacttgaatctacatttctccaaaaacatacaaatgtccaacaggtatatgaaatgatgccgaacgtcactaatcatcaggaaatgcaaagcaaaaccacagtgagatttcacctcatttatgtcaagattgctattttcaaaaaaaaaaaaaaaaaagaagtgttagcgagaatgtggagatattggagcccttgcatgcagttggtagaaatgcaaaatggtagagctgttatggaaaacaatatggaggttcctcaaaaaataaaaaatataactacaatatgatacagcagttccatttctgtctatttatctgaaagaattgaaatcagtgtctcatagagatattagactttcatgttctttgcagcactactcacaataaccaagatgtagaaacaacttaaatgttcatcaaagatgaatggataaagaaaatgtggaatatacatgcaatgtgtttttattctgctttaaaatagaagaaaattctcacatatgcaacaacatggataaaccttgaggacattatattaagtgaaataaatcaattgtaaaaagacgaatactgcatgatttcaattcatggttctataaatctgaaataatcaaatttatagaatcaaagactgaaatgatggttgccagggactgggggatagggagaaaggagagttattaatcaatggatataatatttcaattaattaagacgagaaattctagaaatctgttgtacaacattctatccatagtctacaatattgtaatatacaatcagaaatttaagagtgtagatctcatgttcttacacaagaaaataaaataaaaagacttgtattttgatgggttattttaaagagaaattaagcaatattctcatttgggttgggtgctgtcagaacaaagggcacagttcttgaatgtgtgccatatttattttatttttttaaattgggattaaagtgaagctagagttatcatacgtaaaggaaattttgtgagccaggaaaacatttttcacaaacaatcagtttgtactaaataaccagtaaaataaagtttgtatttttactacattgataagtatggttggctgtctttttttttatttttgaaaactgtttactattatatttgtggattataattacatttattttatcatataaaataataagccagccatttcattgtattgctaaaataaaaagaaataacaaaaataatgacaaaaactaaaaactatgtttaaaattcaagaaatcaagtcaaaaatttgttgactcaatcatataaattgaatcattcttgtcatactaaactaaatcagtcaactggccagtggaaaaagcactcaggacacacagcacctgttccaacgattaaattttctgcaagtccagctgctgaacctgcctgtcggaacttgaattttatctaatagcgactgaaccaacatattgggactctgaggctagttttacccactgctgtcactcacgaatcagagcttgccagttccccaaaacattattggtgctgatcaactttctttcgaaacaatatataacatttctttctttttcttttttgtttaattgtttgtttgtttcttcctttttttttctttttgtttgtttttaagatggagtcttgttctgtcgcccaggctggagtggaatggcgcacctccgcctcctgggttcaagctattctcctgcctcagcctcaccagtagttgggattacaggcgtctgccactacacccgtctaatttttggtttttttttagtagaaactgggtttcaccatgttggtcaggctggtctccaactcttgacttcaggtgatccactcacctcggcctcccaaagtgctgggattacagacatttctcctttttataaagcctccaaccttccttttgtccttcagacgtaccaaagaccacctgatctgtgtataccccaaattgcaattcttgcttcgaaatgaaacattaaatttagagatgtatcaccatattttattttgacttcaacatagtaaaatataaaataaatgttttctgaaatacctttctttttttattgtttaagctcttaaggtgtaagtcttgacatatattgtatatttggaagaatattccagttgcctgtttgtttgatttgccacatgtataagtgactaaaacacaatgatacaaaacaaataaaacatcttccatgggttaaattaggtgaatgaatatttggaagacagttggataaagtatggtgacttttacagtgtccttccactctaactttgagaatcagagcacattgtgtgggcctaggttcctgggggaagaccagaaggttgaaatatatcagggagctgtcacacacactgactgttagatatccatgcagtacaaatcttggtgattgttcactgtggaactttgggaccttggcccctttaccctctcactataactccagatttcaatattgagatgacttcatggaacaacttggtatatagacctggggtcacctcatgaaaattcctcaagtagcccatgtggacagttctgaatactacactttactggggaaaggagcttgatcctacagcagactgcttatacttggatatttagtaagacggtataacatacttctttttatagtgcggtgtaacatccttgtttttatagtgctcagaaatagttaagttgctgtcatcatggtaaattattggcttttgttcaggttaactaaaatcttttaggtatttttttcgaattttttcatttaaaaatattttagggccagatgcagtggctcacacctttaatcccatcactttgggagtccaaggcagaaggatcacttgggaccaggagtatgtgaccagccgcctgggcaagatagtgaaacaccatctctactaaaaatttaaaaaaaactagcccagtatgatagtgcacatctgtagtcccagctactacggaggctgaggcaggaggatcacttgagctcaggaggctgaggctgcaatgagccatgatggggctattgcactccagcctgggtgacagatcaagacactgtctcaaaaaaatttttttttttacatgtgaaaacagttttactttaatactattaggtttttttcaataagtatcatttttgataattccatgtaagtaataaaaccatattagaaaggaacaatgttctaccatttacttgaaataaatttttttcttaaacttttaaaatatattttgtttctttgctatcctggcagatattttaaaaatattttatagtttatgtaaatactatcggtcaggttctgagtactgtgttaccataaaaatttatggcgatttttaagtcagattaagcatcccactccagccctacataggcatgtgtgatcaaggcagcatttctaccacaaagaggtagaattagtaaatctaattcttccaaacacagtttatgttaagtaacactttatctttacccacatcagttctttttattatcaattttggcatgattattaggacaagattttgaattctaacgttttattttttatttttattttctatcaccagttttgtggcctgtatccaatcaccaaagtcatgttaagtaatttttcattatctataaatgttaaaaaagagacttctagcataatttgtggcgaagattcataagcaacctgcctactaataaacaattgtgctttagaaagcgactttagagtaaattgaatatttatgaaaatggactaatatctggagctaaaaaaaaatccatgaaagagaaataatctatttatacataactactctaaaaacagaattattttgtaaagaaattatttatttacttggatatcagtttattagtaatagaaaatgccaactaaatcaaaccttttgtgtgtggaagtttattataaaatataaaaaaataataaatagagattttcaaacatgtaaacaataggaataatatttccttttctgaatatttttaatatttttcacttattccaaacttaaaatttaaaaatccttaatattatttacagggtcctaaataattgcatatatatccattatcccctcatgtttgctaggccatagccttatatatcattacaactcttgaacttggtgtgtttgttgctgcctcaggattctgaatactgctaccttaaaatagaaatgcctgtcattttctccatttgaatgactcccattcatccagttacattacaaataattattttaatgtcatactcttagaaaagacttgtctgaggccttaggctagttaactctccctaatatatttggcattgtatgctgtttagagtaatatgtatgtattatgtatgtaatatgtatgaacagggcaagatacagcaacaataaattattttggagaccaaataatttggaaaacacaagataagcatctgatatatatttaaggaattattgactttgcacattttattcccactagtctataactgtaaaacccaaggacaatgttttccttgttcactaatacagatataccacttccataccagtactttacacatagtaggctttaaattataactcattgaatgaaagaatgaaagaaatggatatgtaaaactacctttctggttttcaatctgctaagcaaaaataagagtttgaaaatcaaaagaaacatagcttacttaattgacccacatacagcatatcgagtaatccatttttaatacctagatcaaaataatagttttataataaactattttccattttcaaataaatatgagtcagtgatataagtacaacctgttacataaatacattgccgttacatgttacgtaaatgcaatcttttacacaccaattgaacaaaaaaaattaggctagtgttaaaacatattgaaattcaagttagaattcctccacattgcatgtatatgctttaaaaaatgtatttacaataattcaatattgagagccaaccttaaattgtcaaacaggaagattactttttgatttgttaaaaaaaactttatttaaattctaagatgataaatatgtatagaatctcttaatctctgtgattaatgcaataaatgtttacagcctcttatgtagttaaataatatgttcaaaaacaattgacctgtgacacaatcaacataatttataccgtaaaattcaaatagatgattgaaaactgtaacttaagcatcttaaagtttattgatccattattttatagccttgtctttgtctagggagatttcatttcaacagctaaaacatagcagtgatcatgaattacatgtttaccagaaaaacctctgctcagttgttcccagaggagtgttcatttctccctcattgtgctctagttcacatgcagaggaattaaccaacctgccacatgtcagtaataagatctgagaagccccagagagagacagaaccagatatggaaccagtgacagaaatatcttcatcatcgtttatgaccaaaacttctatattactttactatcggggggactaaggatcatgaatgcttcctgaatatttataaataccatgacgaaatgcgtgtttttattatactgagaaaaagacttttttaggtaaatttatttatcttttaatatcagctgtttgttttcaacatggaaaaagtttagttttatgtataatgttgttttgagtagaggtagagatcataaagtaatctcttacaaaataactctggaaattaaactgttttaaatatgcaaaggaaaactagcatatatctgtgcagtttcctagtatgtgatacgtgttaaggttgcacttacataaacacctgttgtgagtgtactccccagtttaattgcttttaaaggtttatgtctccgcactgaaaatagttctatagttttgacatttaactttgtttctattttataaacgtcttataaaaaagagaatcagctgggttcttattttttatctaaaatctgtccttgttagacactacaaggaaagtacatggattgatttaatttttgctgtggagttctcattcacatatttttaataaaatttaaatgaacaaatttatataaagtccatactccatctataatgtaacatcaatttacataataattctaaaaatatacagagaaattaagctggaagcatgaccaaattaatcaagaaaattaaaaggtgttctttctattagaaacaagcaaacaaaaagatattctttcatcctttgtgttatgtcttaaatatccatctcaatcaattcatgacaggtttttagatatgtaattggatcttgcctaaactaacacaatttacatgtattttagcccaataccctatattttatttcagagttcatacaataatataaaggcacacgtatgtgtgtacatatatacatacacatgcgcatacatatgtgtatatataatttctcctaattctattttttgaacctctctgctctgaattttttttttattttaaagattactggtcattaaataaaaatcagctaatgccatttagaaacttaaatcatcggcttaatgtcttcctcaattcacacgcttcaaaatgtacaatctataggattagtttaacctttacacaacaaatatgtaatgagccaaatttctgccactcaggataatttacatgagtttttgattgggaagtaagttactcaagaagtgaaattccgacacaataaaagcaactttcgggtcctgatttcaagaacagcctgattgcaaagatgacctcctggcacaaaagcttcaacagcagagactgtggccatggctgcatcacctctaatgttcggtgaggcagtggcgaccccaacagagtacagatggccaactgttcttaatgctttcgagcactgtacctggaagactagcttgaaactgttctggaaatccagtagcatatgtctgtcatttctgggaaattttctttcattattattttgacattttctccacagttttgttcatcctctcttttagtaattctattagctggaagtttgattttcttgagcgatcatctaaagtttttatgtcttctcttttacctactcttattgaatgatttttgtcccattttgaaggctttctgaattttaactccaaaatatctatttaaaaaattataattttgaggccaggcaggatggctaatgcctgtaatcccagcactttgggaggctgaggcaggctgatagcttgagcccaggagtttgagaccagcctgggcaacatggcgaaaccccatctctacaaaaactaaaaacttagccaggcatgatgaggcatagtcccagctacttgagggtttgaggtgggaggattgcttgagcctgggaggtgcaggctgcagtgagccatgaccataccaatgcactccagcctgggtgacagagcaagactctgtctcaaataataataataattaataataattattattattatgccatcatattatttatgtcattttcatgcatggtatttatctcagaacactgtatttcatatttttgcatattgatttatgtagtaaaatttacataaaatgaaatgcatgtagtttaactgtacaatgtaataaatttaaataaatgtgtacacttttgtaatccatattcaaatcaagatataaaatacttccaatagactaccactttcttccagtcaatccctcattccaaaaaaaaaaaaaatctgtcccaatcatatcaccatgaaatggttttgtctatttttgagctttataaaaaataagtcatacaatttgtacgttattgggtttggcttggtttcctcaataaaacatttttgagatttgtgttatttcaaatatcagtatgtattgtaatattttatactgctgagtagtatccattgtatgaatataatacactttttatctattttttcttaataaacttttgtgtagtttccttgttttttaaaaaataattttggggctgggcatagtggctcacatgtataatcccagcactttgggaggccaaggtgggtggattgcttgaactcagcagtttgagaccagcctgagaaacatggcaaaacctcgtttctgcagaaaatacaaaaattagccaggtttggtgacacatgcctgtggtcccagctacttgggaggctgaggtgggaggatcacttgaacctaggacgtcaaggctgcagtgagcagtgactgtgcactgcacctcagcctgtgtgacagagggagaccttgtctcaaagataaaaataaaaaataaaattaattttgagaaggtatctcttatgaataaagctgctgtaaacattcctctaccagttattatttgggtattcttttttatttatctgtgggaaattcttagaaatagaatggttgagtcagcaactaggtaaatggacagtttttccaaaattgtttaaacattatatactcccattagctgtgtatgacagctccaaatcccatttatctgcaacagatttgagatagagattgtaattttagtcattctagtgggtgtgcagtgatatcacttgttggatttaattagagtgttcctgataattaatgatgtggagtattttgtctagagtgggaactagagggaggcggctctagggtgtccttggttacatctatgcagagtagagcctccgaagcatggaagtggaaggcagtgcgatggtgcgatcttggctcactgcaacctcctcccctgggttcaaacgattctcttgcctcagcctcccaagtagctgggattacagatgcacaccaccacattcagctattttttgtatttttagtcaagacggggtttcattatgttggccaggtgggtcttgaacgcctgacctcaggcatccacccacctcagcctccttaagcgctgggattgcaagcgtgagccaccacaaccagcctggttagattttttaaaaaatgtaattcttactagtaactgttttgctaaggagagggcctgtcatcctcttcacacagccattccagaaatcccacatcttccccttcctttttgaaggatacctttttgagatataaaaatctcagtttacagggtatgttatttttgtgtattgtttccactaatttgtttgcttacaacactttaaatatgttgttcctttattgtatggctcaaattgttttttttgtctatttatgtaacgtggtttgcttatttcctagagtgtgcatacacgtttctctgtctgacagggtgagagtgattggtgattcagattccttctgtaagtcaattcgagccttaataggttttgtgcattggttcttattccaacttttcacctccagtggcaccagaacatttttgtttgaaatatttgaattgtaaatgaattgaagttttgggtttttcagtttacagttgattcaactaaatgcccccaagatgggcaacactgcatttttttcttccttatagcccctcatccaatgccccttttaaagcaaaatgggaagagacagcaaaccaagtgcaaatctagaagtatgaacctaccacagttctcttctcaattctacaaagcttgattttaatctagaatttttgttagtgaggctcccttaaatctactattattttacagctctatcttagactttgctgcctgggtaaatcacacttccatatgtcctatgttgtttgaggtcaatcaatatttgtaaaatacaatttaaactattttaaatgacttctttttaatgtgaaagaatcaaaataaaatttgtctgtatagattttctttatgttatgtcattttattttactttatttcaatgagatagggtctcactctgttgcccaggctaagtgcagtggcatgatcagggctcactgcagcctcgacttcctgggttcaagcaatcctcccacttcagcctctagagtagctgaaactgcaggcatccactaccatggaagtcatggatttaaaaaaaaattttttttaaatttttttatagagacacgaccttgctttgttgcccaggctgtttttacattatttaaaactcaatgttttgaatgtctctaagaaagccatacttttttgttaatatatctatattacaaaagatatatgcatgcatacacatacatacatacacacatataatcacaaaaagatgtgtgtatgtatagtgtgtctatgtgtgtgtatatatatatagtatatacacatgcattaaaatgtatatgtattttaattataccatggaagaaaagaagggaaaatacatatgtattcattaaacatgcatacttagaacatattatggtcttgtctttattgttagattaatttttatgtatgactgtgtctcactttcagttctgaaaccctggaattaactgattaacaatgccaatgcaaatatatgtttcttactgtataattatagcttaaaattagaagtcccatttgttatttttaaatgcagaaattagagtgtgccagaaaagtcattaaatattaattcgattaaaacagagatcagtaaagaagaattttcttatatcacagaaataaggcagtgctgatagaaaacatacagagaagaaacccaaataattcttaataaattaaaacaaacaaaaaagaatgtaactctccttttgatcttcagaaaaagagacccccttctgtggttgaaaggagagatatacttttaactaaagtcaattatagataataattcatcatcataattgagtttttgatgagaggcaatgtgttagttttctatggctgctgtaactaattaccacaaactggggacttaatagaatagacatttattctctctagctgtggagactagaagtcttaaatcagtatcactggaccaaaaccaaaatgtcagcatggccatactgcctctaggtgatctaggggtaaacccatttattactttttttttatttatttttttaacaaaagaaggagctttaatggacttacagttacacgtggctggggaagcctcacaatcatggaggggcaaggaggagcaagtcacatcttacatggatggcagcaggcaaagagagagcttgtgcagggaaacccccatttttaaaaccatcagatcttgtgatttcttgctctttttagcttgtagtgagtacaggcatttacactactctggtatctatccctgtggtcatgttgccttctcctcctctgtctatatcaaatcttcctctgcattcctcttattaggataaatgtgattgtatttaggacccacctttataatcaaggataatctccttcatctcaaaattttcaatttagtaacatctgtaaaatcatcttttccatacaaattagcattcaaaagtcctagaaattagaatgtgaatatcttttgggaggtcattatttcaataataatggtaagaatcaattctagaacacagattgtaaaaagggactattttttcaaaaaactttgattcacaaagaaagtgaatctttttcctttcccacatatataacaaaaagtggacaatactgaaataaataacagttttgtttaaaaggcaaacataagaaccattcatgtttttcattttttttgtaaattggaatgtttagatggcaatgtttatgcctattaaggtgcaatttgaaggagtatatcatgatgctatgttggagaattatgggacttctttaacgcaatgttccaaagtgaacatcattgctatttctagtttctatatctttgctgttgtgctacataggcaaggttgttagcatatattttaatattaataaactgcttagcttacatttgtaatgggtacagtgtcaagcactgtagttcagagcacttaaaatatcactgattgattcacaaatgctagcaaatttctgtcttgcatgtagtatccgtgtgtgtgtgtaaacaaatcagatgccatatttttattatttttcttaagtttggctaagagtcttcccccttttaaatattattctcatatgaattgcctgagacttctcttagaggaaaaaagtatcatgtttgttcactgcggaacattctgttttcacattttgagcttaagaaaaaaagtactaaaaataatttgaaactacacatttgacaggggactaatattcagaatttacaaggaactcaaacagttcaaaaataaaaacaacaatgaaaacaacaccattaaaaagtgggcaaaggacctgagtagacatttttcaaacaaagatatacttcttaaaaagacaaaacataacagattttggaagggaactcaaataactcaacagtaaaataacaaataatctacttttttaaatgggcaattgttctgaatagacagttctcaaaagaagacatgtaaatgaccaacaagtatatgaaaaaatgttcaacatcattaaccatcagggaaatgcaaatcaaagccacaatgagagatcatctcacaccaaatagaatggctattaccaaaaagacaaaaaataacacatgctggtgatatggtttggctgtgttcccactcaaatctcatcttgaaatcccacatgttttgagagggacctggtgggaggtaattgaatcatagggcaggtctttctcatgctgttctcatgataatgaataagactcacgagatctaatggttttgaaaaacaagaatctccctgcacaaactctctctttgcctgctgccatccatgtaggacatgatttgctcctcctcaccttccactatgattgttaggcttccccagccacatggaactttaaattcaattaaacccctatcctttgcaaattgcccagtctcaagtatgtctttattagcagcgtgaaaatgaactaatacagtaaattggtagcagcagagtggggcattgctgaagagatacccaaaatgtagaagcaactttggaactgggtgagagacagaggttggaacagtttgaagggctcagaagaagacaggaaaatatgtgaaagtttggaacttcctagagacttgaatggctttgagaaaaatgctgatagtgatatgaacaataatgtctaggctgaggtggtctcagatggagatgaggaaattgttgggaacaggagcaaaggtgacccttgtgataatttagcaaagagactgatgtcattttgccgtgcccttgagatttgtggaactttgaacttgagagaggtgatttagggtatttggaagaaatttctaagtggcaaagcattcaagaggcgatttgggtgctgttaaaggtattccattttataagcgaaggagggcataaaagtttggaaaattcgcagcctgacaatgtgatagaaaagaaaatcccattttctgaggagaaattcaagccagctgcataaatttgcataagtaacaaggagctgaatgttaatccccaagacaacagggaaaatgtctccaggtatgacagaggtcttcatggcagcccctcccatcacaggcccagaggcctaggaggaaataaaggttttgtgggccaagcccaggtttcctgtgctgtgtgcagtctagggacttggttccatgaatcccagcttctccagctgtgaataaaaggggacaaggcaaagctagggccatggcttcagtgggtacaagccccagtctttggcagctttcatgtggtgtttagcctgagggtacatagaagtaaagaattgaggtttgggaacctctgcctagatttcagtgtatgtatggaaatgcctggatgtctagccagaagtttgctgaaggggaggaactctcatggagaacctctgctagggcagtgcagtagggtaatgtggtgtcagagcctccacacagagtccctactggggcactgcttagtggagctgtgagaagagggccaccatcctccagatcccagaatgttagatccactgacagcttgcacagtgtacctggaaaagctgcagacactcaatgccagccaatgaagccaactgggagggaagatgtaccttgcagagccacaggggcagagcttcccaagaccatgggaacccacttcttgcatcagcgtgacctggatgtgagacatggaatcaaaggagataattttggagctttaatacttgactgcccccttggatttcagacttgcatggggcctatagcccatttattttggccaatttctcccatttggcatatctgtatttacctcatgcctgtacccccattagcatctgggaagtaattaacttgcttttgattttacaggcttataggtggaagagatttgccttgtctcaggtgagattttggactgtagacttttgagttaatgttgaaatgagttaagcctttaggaaacccttgggaaggcatgattggttttgaaatttgaggacatgagatttgggaggggcctggggcagaatcatatggtttggctatgtcacacccaaatctcatcttgaatcccatgtgttgtgggagagatcaggtggggggtaaatgaattatggaggcagttcattcccatgctgttcttgtgataatgaataagtctcacaagatttgacagttttgaaatacaggagtctcccttcacatgctctctctttgcctgctgccatccatataagatgtgacttgctcctccttgccttccaccacgattgtgaggcttccccagccacatggaactgtaaatccaattaaacttctttgctttttaaattgcccagtctcaggtatatcttcagcagcagcatgaaaaccgactaacacagctggcaaggatgtagagaaaagggaacccttatatacttgttgatggaaatgtaaattggtacaactaccaatagtatgaaaattagtatggagatgcctcaaaaagctaaaaatagaactactacatgatctaacaatcccactactgggtatatatccaaatgaatggaaatcaatatgttgaggagatatctgccctgtcacattaattacagcaatattcacagtaacagatacatggaatcaacctaagtgcctgtcaacaaatgaatagataaataaactgtgtgtgtgtgtgtgtgtgtgtgtgtgtgtgtgtatgaatactattcaagtctaaaaaataaatcatgttttttgcagcaacatgaatatagctggagtttatcatattaagtgaaactcagaaacagaaaaacaaatactacatgttctcacttataaatgagagctaaacaatatgtttacatggacatagagtctggaataatagacaatggagactcaaaagggtggaagtgtgagagggaagtggataataataaattacttaatgggtacaatgtttattatagatatactgaaagcccagattttgccactatcaaacatataaatgtcacaacattacagttgtactccttgactttatagaaataataataaaaaaaacctgaggtaatggtgcatttgaatcggaaagtttactgcagtcagtataatttccaaagatgaaaaggttaatggagtgtgtttctttattgtagtgcagtagttctgttcttttttttttaattgaaacacctataatctttctctattttgacctacaaaagtacatttaaaagaaaaatgtaatcatttcattataaatatcattataaatctgttagaatatacaaatcacaaatcttagaatatataatgataagtttctgtctcataatgtaaacataatacaatgttcaatattgttcttattttctaagtgaaacattgtcatgacttcaatctaaatatatttaatgagagaccacaaacaatgtattttgacaagtggtagttagtctattccattatagccatgaacataaagggaagaattttaaatctagcttccctctagattgaattggaaaagtgattccaaatcatgtcaatggccatttattaacccaaatgcatgttaaaaaatcatatgaccagaaaacggagtgttaatatttgcaaactgaatcttgccagggcagtttataaaaagcttattctattctgcctaatgtagctattagtaatgtagaactgaaaaagaaactagaggaaatatcaaaatatcaacttcttatgtacatcgtttaagagttaaatactactttatgatttcaacattttaaagccatttgtaattttctaattgaaaaagtaatataacttcattatttatattttttattcgacaaaatttactatataccttctgcgtaccaggtactgtcataggcccttaatatgtcatgaacataaatattcattttcctgaaaatttcttaacttacatttgttatactctactaagtgaaatagagaataaacataataaacaaataaaatatataacagactaggtagtggtaattttaactcagtttaatcaattcagttggatccacaaacaattttttggcattcttgtcaggaagcacatttactatgcagagaaaaaatacagtcttcaaacaattttaaatatttttatttgatcttatgggacaaaaagcatggcaatcctaagattttgcattaccttctccaatgcaaaaaaaaaaaacccactctttttatgataaagtataaaataaataaaatataattcaattattttgctggacttaatatttaatatgagaaaatgcactgtgtgcaatgttgaaataaggttaccatggcaaccatgtgctttgtgaaatacaaaaattatttctgttgtaaaattccataaaacatagaccttaattcgaggcttcccaagaatttctatgttgtgcaacttcttattattaaatttattttttattataatgactatatacattaaattagtgccatctcttcagcgtttacagcattcatagcatatttattctctaacgaagaggccaaggcaccagaagaagtaaacacattagaaacaataagttaaaaaaaaaaagaaattgttctttatacgggaattgcttttataataattttttctatatatttttagatttttttctagcacatccatagacaataataaaaaaaaattagtcatctcaaacaacatgcctaatattaactgaagtaataatataattcactttttaaaaatttaatggaggtaagtaatatagctgtgatgtaagtcacatgaatttattttacaaagttttataatctcacagaggtgactggcgcttgttaataatttgtaaaaatgaacttttaaagttcttatgacagtacttaatgtttttctccttaaactatggaaagactgtcctatttaataaaataatccaaatctgaagacgtccatatatttccaaaacatactttcttgaaaacctccattacatttcttataatgtgacaattttcttgaaaaggggtgtgttctctcctttttatgattctaactacttaagtggaatagttttcagaattttcttcccattgttaataactgtatatatataattttgaatacaagatcagtttctctcactactttgaccacagtggtgactagaaaataatgtaaatagatcattattctaatttggcaagagtatgcttaacatattcctagataatttcatgcatattttattagtaaagtaacttgataatatctttacatttatcttggtttttgttttttttttttttttttgagacagagtcttgctctgtggcccaggctggagtgcagtggtgccatctctgctcactgcaagctccacctcccggcttcatgccattctcctgcctcagcctctccagtagctgggactacaggcgcctgccaccacgcccagctaatttttgcatttttagtagagacggggttttgccatgttgaccaggatagtctcgacctcttgaccttgtgatctgcccaccttggccttccaacgtgctgtgattacaggcatgagccaccgcgccaggccccaaatttttaacataagcagttttagctttatggatttcagaagtggttgttagatacaaaaagtgattagtacagcatgactataattttattattattattattattattttgaacacaatagctctaaaattctccaaatttttaaagcatatcttgttgcttaagggtacatgacatggactatattcctagatgcatttagggcatttatactcaattttcagggcaacgaataccctctccttaaacgctttctggaatcctctgtcccaaaaaaatgaatagtcaacttttaaaagaagtaacaatttattttataaattgagacttcctgtgagtcaagttattttgaaataaaatcttaaaattagaatttaagtgcacagtcttaaaaatactaatgtacagtttttaaaagctctcttatgaaacttttctgtgaagttaaaagaaaatattttctgtggcatcaaaaggtattagaagccgtttgatttcttttgtattttcatttattttgtgcttatatttttgttctgcttttaatgtaccatgataatctaacatacaaaatactcatatccttagagagaattcaatagtaataactgtgtattttactaaaatttaaaaaaacatacaggccaacaagagcctaatctgatcatgttattttatggagaattcataaaggtgacactttgagaggtgtacttttctgaaatgacaggtattgttatcctccaaagtggttcacgaatgtaatcaaggattcagttacttaagaagccttttagaatttactaaaataacagaaacctgcgttatacctctaaattcatggaaagtttctttttatttatcctagttttcttgtttttattctaagtttatagctataatttttctaaatgtcacactgacattatctgtctctctctagaagaaaccccaggctccatgaaaaagtgctctgtcgatttctctcatcattgtactccgatgactaacgcaatgccaggcaaatcagaataagcaataaatattgttgggtgaatggttgagtgttctcattaccgcaaacaaattaagttgatttttcacagaattcttcaggtatggaaatcattctattttaaggtcagaaaccaagcagaaaaacaaaatctaataaaatcttagttatatttcttattaaggtataaaactcagaaatgtgttttcaattctacacggttacctcattttagaatttattgtgattcaaaattttagcatttgcacatttgtacaatattgcctcctgcataatcactgtaaatgcatttaattacattcaaatcacaacattaaaaagtatcataagtgtatggtagtatgttagagaaaaaacataatgaactgactggaaattgttaggaacaatgtagattacattttaattaatctactattaaaatttgttttctctcaccatgtgttgtgaaacactgctatgtatttacttcatattggaatcacaatttgctcatgatttcaaatctattattacatgtgttacatgagaatatttaaacagtgcaatctaccttaattatttattgtcctatatgcatattgcagaagatctgaaaataattcattttttacatatgtaaaacaatctctaagttagataaacagcatagccatcctgggtagcttgaggagtgataaaaataaaacaatcacctactatcagcaacaataaaagcctatttgttcttaaagtaaattccagtttagataaaataacttaaggtgcagtgtcacatgggctatgaacaatcttgcttttgaaattactgctcttttataaaactgaatctatatgcaagtgaggactgttataacagcttaagtaatgggctcatttagtgatgaaatgtttctatagttcaaatatttagtattttacacagcatctgttttgtcacataaatgttctccagtcattaacgtacgtactggacataaatctttttttctggggattatattacttgattgttattaaggtcttcagttaatatgtgccctgtgaatttgttaatattatcccaagccatagagcaagtcagccaagccaaatcctaagcaggatactaaacccttctcacgtttaacccccattttcagtcatattcctatttaatattcaatattcattctagtacactcattatatgtcacaaattactccacgtctctccatatcaactgtgactgtctttgttaaatttctcattgtttaaactagatcattcaataatctgatagagtcataccttactttattgtgctttgcttgatgtgtttcacagataccatgtttttttttttttttttacaaattgaaggtttgtggcaattctgtgtcaagcaagtctatgggtaccaattagttcaatagcatgtgctcacatcatggctcttgtgaaattttggtaattctcacaataagttaaactttttagttattattacatctattctggtaatatgtgatcaatgatctttgatgctacaattgtaattgctttggggcagtgtgaactgtgcctataaaagacagcaaacataatttataaatgttgtatgtgttctgactgctccactgaccagccgttccccaatctctctccctttcatcgggcctctctgttccctgagacacaatcatattgaaactagaccaattaggtcaggcgcggtggctcacgcctgaaatcccagcactttgggaggccgaggcgggtggatcacaaggtcaggggttcgagaccagcctggccaacatggtgaaaccccgtctctactaaaaatatagaacttagctgggcgtggtggtgggcgcctgtaatctcagctactcaggaggctgaggcaggagaattgcttgaacctgggaggcggaggttgcagtgagccgagatcgcaccactgcactccagcctggttgacagagcgagactccatctcaaaaaaaaaaagaaaaaaagaaaaaaagaaactagaccaattaacaaccttacaatggcttcttagtgatcaagtgaaagaaagactggtatgtctctcactttaaattaaaagctaaaaatgattacgtgtaaagaggacgacacattgatagttaagatcaatgagtgctagacctctttggccagttagcaaagttgtcagtgtaaaggaaaattattgaaggaagttaaaagtgctactccagtaaacacatgaataatatcagctttgttgctgatacggagaaagtttgaggggtctggatagacgatcaaaccaccataacattcccttatgccaaagctaatccagagcaaggccctaaccctctttaattctatgaaggctgagagatggaagtgagcttcagcagaaaagtttgtagctacatgagattggttaattagattttaaaaaaatctaaattctttacgcaatctccataacataaaagtactaggtgaactagcatagtaagggttaatgtagaagctcagcacattatccaaaagatctagctaagattgttgatgaagggggctacagcaaacaatagattttcaatgtgaatgaaacattcttctattggaagataccatctagtactgtcatagctagagccaagtcaatgcctggcttctaaacttcaaaggacaggctaactttctagttaagagctaatacagctgattaagttgaacccagtgctcatttatcattctgaaaatcctaaggcctttaagaattatgctaaatctgctctgcctgtgctctataaatggaacaacaaagcctgggtgacagtactcctctttacagcaatggtttacctaatattttaagtccactgttgagacttactgctcagaaataaacaattcctttcaaaatattacggcttattcacaatgcacctattcactaaagagataccaggagtttaaggttgttttcatgtctactaatacaacatccattttgtagcgcattgatcaaagagtaatttcaaatttcaagtcttgttatttaagaaatacattttatgagtctataattggcataggcagtaattcctttgacgtatgttggcacggtacgttgggaagcttttgaaaggaattcatcatactaaatgcctttaagaacatttgtgattcatggaaagaagtcaaaacatcaacattaataggagttggaacaagtttgattgcaacattcacacattactttgtggggttcacaacttcaaaggagaaagtaactgcagatttggtgaaaacagcaaaacaactagaattcaaagtggagcacgaagatgtgactgaattgctacaatctcatgataaaacttgtacagatgaggagttatttattactctgggtaaaatactatcaaaaagcactgcatgctacagagaactttttttataaaaggaagtgtcaattaatgtggcaaacttaattgtcttgttttaagaaattgctacaactaccccaatcttcagcaaccatcatccccatcagtcagcagccatcatcactgaggcaagactctccaccagccaaatggttaagactagctgaagggtcaaatgattgttagcattttttggtaatacattatttttctttaaggtatatacattatttttgcagacataatgctattgcacacataatagattatagtatagtgtaaatataactttaatatgcactgggaaaccaaaaatttgtgttactctgttgcaatatttactttgttgaagtggtatggaacagaaccggcaatatcttctgggtatgcttgtaattgattcttcaacctgaagtttgtcctaattccattctatactcctccatgctttcaaatttacgtacacatactgaagtgcacaattatgatctgaagagaagaaggacatttaaaatcatcatcacaacaataagagttgacaacctggcaagactgagatcactgaaatcaacgagttgattgcaaagaggatcaagccaattataaagcaagtttagaaagaggagattgttttgagtgtgtgtatggagactaagaattgcctcctggaggagtgaaatagaaaaataaaccaggcatggtggctcactcctgtaatcccagaactttgggaggtggaggtgggagcatcacttgagatcaggagttcaagactagcctggatcacatagtgagacccaatatctaccaaaaacaaacgaacgaatgaacaaacaaacaaacaaacaaacaaacaaataagcatgatgtaatggcatgtgcatgcacttgtagtcccagctactggggtggctgaagtaggagaatcgcttgggtttgaggccacagtgagctgtgatcaccactgtactccagctttggtgacaccgtgagactatttctaaaaaaagaaaaggaaaaataattcaatttcccaggaaacgacatggatttttttaagaaagcagaagtcagtacagctattgtcatactttaattttaccacttgctagcaagtattatctcaggtgagttaattgccttatttatttagcaaatataattgaatttctactatttatccgagtccaggccctggtctaagatctggagattcaaagatagatttctttagtttggagtatttttctcacttaaaatgtttagtgtgattatttcaattaatgaaatatcaaatactatatacttccctcaaatatagtgaggtcaagtcatatatgtgtatacatctatatctatctatctatctatacacacatgtatatatgaatttttaaaattttcattatacgaaagttgttttctctttttgtgttgttctttctctcatgtggccagactataaggttgaatgaggcaatgaaaacctgtgtgcttgaaggataatggtaagaaatcactgttcttatccctggcttttgagggatatgttggtatgtttaatatcccacgagattgaactggcataatcaactttaattatcaactctttgtcaggtatcccaattcttgtaaaaggcatcagtacctaagaaaaccagagggaaagacacgtggaaacaaaaataccctgcacagctctaatcttgcttcccaggtcaaagtgtggagggggagaatgattaaagtgcctaggaatcttttaaatatcagtttgtttacccaaattagaaaaatgataaataggttattgagactagcgtcttgatctgaaaataaacacacgtctttttggaatatacctttttctacagattagttaactgttcaatccgaggttacagattttgtgaacatgaagtatggtgaaagaaaagaaacaaaccagagcttcaatctaattagttatggttaaaatgtatgcaaatttgattttacttttgtttaggtgttttctttcagttctctgtaatgagtgatacaaacctaaaagtaatcttttcaatctcccatagtgcctcaagccttcccaatcagcggatgatcttgtcttccatgtcagatattgttgcaaacttcttaaaaaactttgggatcacatgggcctgaattaaaactcccatcttcggctttgtaatataagatctagggcaagttatttaaaccatgtgtagcttaatgtccttgttctcttaacccaagaatagaaagttctaaaaattattatttgtttttccatttctatatctatatatatctttaccttttcttttaattatagaaagtggggaaaggaactatatttattctctcttaagacctccctttgtgctcttgatttcttcccttgctgctttctaagaaatgttgttttctattatatttttgttttctttttaaagatttcttcattctctcttgccatttgaaactacttcttagtctacaatatggtcaggcatccttccttattttctattgatttatcacctcactatactatagccaatctctttattgcaaaaatgataaaatattaatatagtcctaccatctctatattctcacttgttagtgtactttatcgtaaattctgcctaatacatcttttctagaaactgtcttgctcagttcaccaatggaaacttaatatcaaaacataatgattttttatttttctttatttacatttaccactgattataagttaagcatcttgttcttaaaattttcttcttctgtgtccaagactttgattagttctggacttatattttacattttctaaattaatttaccccggtgtcaatacattttatagtccaaatgcatcagcatattagtttctctaaattctaatcttcttcagtttaactatttcaaacattttttctcgcatagaatctgacttcatggttttaaatattatcaggaagactgttacataaatatctcagtttaactcttttctccgtattagatgatctacttatctattgataatttttttccgtgatccataggtgctttaaatttacctttggagtttctatcggaaatatcgatatgaaatagctgttatgatagtaacatagatatgtctgtggtagaatagctgtccccagagatgtctgtatactaattcacaaaagctatgaatatgtggcctcatgtggaaaataagttgtatacaggtgtgattaagttaagggaaattatcctgaattataccagcaggccctgcaaccacaagcatccttaagaagtgaaggcaggagtgtcagagtcagacgagatctgatgatgaaagcagaggtcagattaaggccaggaaggactgacatggcaagaaatgcagatgatatatagacgctgcaaaaggcaaaaatttcacaaaggcaaaatgatgatatatagaagctgcaaaaagcaaacattttgcaaaggcaaaaatttccagaagaaacacagcatacgcgacgccttgattttagaactgctgatccctgaaacactgagataatgaatttctattgtttcaagtcactgcatttatgataattagcaataagaaactggttttgatactgaaagtggtatgctgatataataaatgtatacttagcatatgatttgcatttcataataaatataacaaaaatgtggatgtaattgtggacttgggcagtgggcagaggctggaaaatcttgagaaacatgacggtaaaagcctagattgccttaaacagattatttgtagaaatggttcacaaatctgctggagtgctcaatgtgagaagcatagtaaagataaatacataagtaaataaataagggagtgtgtgtgtgtgtgtgtgtgtagattataaactgactgtagaaatatgaacataaaagtaaccactggtgagggctagaggaaatggtgatcatggtattggaaattggatgaaaggaaatctttgctatacagttgcagaaactttggagaattgggccttacagctatgcagaaagcagaaatttttcacagtgaacttgtatatttagctaaagagatttccaagcaaagtgctgaatgtgtagactggtttattcttgctgcttctgtgagaatgtgaaaggacagaggtcgtttgaggaaagaactgaaaagaaaacaagaaacagaggcttgataatttgggtaattttcacattgcaaaagacactgcaattagaaaactcactgttaagaaagttggctgtgaagagaaggccagggtgtggctctacaaccttttgctaatgtgtagaaagaatcaaaaggccagaatattccatcacacagagggttttctgaagaaattagacatgtgacttacagatccctcagccactaagcagagccaagaacagagatgatcttatgcagaaatatctatagtgaagcctattgtccagtggaatgaatccccaaaacacttattggaaaaacacatgaatcttaaggctgttgcattagcagaaacattgccagctgaagctaaaaggaacagagagaagaaacaatgaaagaaggctgttgaactctcaaagttctgtagacaggaaataggtaggtaaaattatttaactgtgaacacatactatccttcattaaaaaggaaggatgactcgcaggacagagcaacagacccaaaagctcagagaaatagctgagacttaaagaggattatttgtagaccatggaacctaatgaagttttccctgctggattttgaaattgcataagaactatgattcctttttttcccctctattttcttcttttttgaaaagagaatgtctataagtgtatcctgtgctagcccaagcattggattttggaagacaacttgctttctaattttatagatccacaagaaaagagaaattttgttccaaaatggatcatatccaacgcctcacatatttcatatttagataatttacatgatgaaatttgaaacttttgagtgggtgagatctagatgaaattttgcacctttagttgatgttgtaataggttgagacttttgaatatgtttggataggtaaatagagtttgcatgtggaatgaatgtgaatatttggaggtcagaaggctatgtgtgaaaaaaaagtgccccttgtcccccaaaagatctccctgttgtaacccttgacattttttaatacattaacttacatggcaaaatggactttgcagatatgaataagaaagtatcttgagatgggaagattatcctggattatctgggtgtgcatggtataatagaaaacctagtgtaaaccaaagagggtggcagaaaatgagagtcaataggagatgcgaagatggaagcagagatcagaatgatgaaagaaaaaatacaggagactaggaatgcaagtgacttttaaaatctagaaaaagcaagtacactaattcttccctacatattgtagaaggaataaaactttgcttactcattttaaacttctgaccttcagaactgtaagatgataaatattaatatgtttagtttcactataaagagtttataatttactatagctgcaataggacactaatacaacttacacttcattacttatacctcatggttttgatgatcacctgtcaatcaaaagactacattagctaaagcattagtcctaatttgctcacctataccccaagtgtaaagacaggtcttacctcctcagcatacattttaatttataaggccaacccagaacctacccatgagagagagcaaaagttaataaggtcagtagcaattaccataaattttattaagaaatttctgtgaagttgaaatcattaattccattaagtggaaattattctaaaagaaattgagtcaagggttgtcttccttacccatgttccagaaaatagatgatcataaagacgtccatttaacaaattacttatgtatacttatacatatgtaagcaatatacaagtattttattatacataagtaacatatacataacatttatcataaaagtatattttataacatagtataaaagtatattttgtagcatattacaaaagtaatttatacagtatataagtaacatatataacacatacattacataagtaacatatataacatcatgaaagtatattttataacagtataacatttattatgttatagcattattatatatgtcataacatttattatatattatgacatatacatttattatatattataacatatataatgtttattacatgtcataacatatataacacatatatgttataactaacatatataacatttattatatacattataactaacatagataacatttattatacacattataacagatataacatttattatatacgttataactaacagatataacatttattatatacattataactaacatatataacacttacatataacattatatgtaatgttaacattatatatgttatatatataacatacataacacttaacatatataacacttatatatgttacttatataatgtatacattacatttataatatgtatataacttttaatatgtatataacttaatatataatatgtatataacttaatgtttaagtattttatttgggggatgctaatataaataaattttttctccacttataagttttgatgagaatgatggggataatgaaaccaacatcttctgtgaaagtttctttgattaatatccctttggaataagaaaaaattaattcatattggaatttctcagttatttttaatctattacatcttcatataatatgtaatttaatttgaaaatcaatcccaaaggttttggagtcaatcaggcacatactcggcatccaaattcttaaaagaaaaaaaaattgtttcctatttggctggttgtttaatcaggggaattaagaatatctatcaaaacgacacatacatgtatcctctgatcacaaaatgtaacttataggatgttttatatcaaatatacacactattattaaatgcaacactatttgcaataacaaaatatagaaaataaaataagaattcatttctgtaaaatattagggttctgtggagactggagaaacagtaggatgtgtgtgtgtgtgtgtgtgtttgtgtgtgtgtgtattatgaaactgagttacataattatggaggctaaatccaaatcttcggtcttgcacagataggctagagacctagaacatccaatggtataaatgaaatccacaggtactctgctggaaaattccctctttcttggggaagccccagtctttgtgttttgtttaaaccttaaactaaatgaggcctacccaaattaagaagggaaatgggtactcaaagtttaaaggtcagggaaccaatggcggattctgctggttgctgagcatatctgttccaactatatgctctggaaccagagaaataaccacagatgggctcaaggacagctaaacccactgtgacacagaccttagctgaaactccattgatcacctgagctctttaagcacctaactctgactagtggaccacagcagcattctgggtctcttaaaatttgtgtcagttcagagccagtgtctaggggtccctgaaaggtccgattagttccttttccaaaatgtgcagttaacccacaaaaagccttatatgcctttggataaagataggagaaatagtatacatttttggcagtatactgaggtccctcatccaaacaacttggcctcccattcattcaaagggatctgggtctgaaagctggctcaagcctgggaattgataagaggttgttgtgactctgttttatgattcagcttagactatttttcacttgacctaaaaattttctgcttatacagatcaagtaagaatgtagtaagcctcctatttctttcatttctagaggcaccgtgattaacttaccaaagctctaggtctgctcaagtcagattattctgattgttgctttcactctgctttccattatggtaacaacacctgccatttgcagtcgagagctaaaacttggctcttgtgacactggaatccaattattccaattacgtttacatttccaaatcagtgaatgcagttcccactgtaaggtctgacctacagagaagaacaataacagcttttcagtggagctagaacacccctcaaatatttgttttttacaattgtaatgaaaggtatgttatgatgggtaaatgggtcttaaataaccttaaataaccagagtaggaaggcaggtcttaaatgacaaatccactctaacattccaatctcattaagtccttgaatctctcctctctattaaaccaaggcaggtctgggcatttctcaggtaattactgggggctaccttttgatctatgttttgtctaatcgacatccccccaaaataaatctggtggagcctcttctatttccttgagctgcaacgttaaatgcagaatctctgcttagtgggcccataacaataacgtcggcctgatccaactttaggtttcccccaccattatcccacactcttaatatctactttcacacctatatcccagatttctgtctgcataaattagaaaactcaggtagttcttttgaagtgtagcatacttcttcgtaggtcatactttttacctcacctttaggggactgctggaaactgagtctagttgtaggtcaaagtgcaaaaggaatgttggattaagtctcgaggagaatagcatgtcttgccaggtaatagcctcaacaaaggccattaccattttctcaggcattgccctgaaatggaggttaagagactgcttctactggcaaaagaagaccaaacaaattttagggggtaaatgtcacctgctttatcactgtctttccacatatccccattccaacttttaggatcccatttcttttttctttctttcttttttttttttcgagatagcatctcgctctgtagcccaggctggagtgcagtggcacgatctcagcttactgcaacctctgcctcctgagttcaagtgattttcttgtctcagcctcccaagtagctgagactaccatcatgcaccaccatccctggctaatttttgtatttttagcagagatggagtttcaacatgttggccaagctgatcttgaactcccaggatcccttttcttcccaatcaacatccttactttaatagtacacaccatgagaggctgggaatttaatttgcattgtaagtcagccactcacaggatgagattctgggttttgttttcagcaatctcagccctgtggcttcagactatatgagactcttttactttagacgtagaagcttttgctgtttcatgcaatattttagctagaaaatttaatacctgagctcatcctcttatttctcctactttgtctagtgacattaggggtaaccagtcaatctcattctactcattagtttgacacatatatgtgtgtgtgtgtgtgtgtatatatatatatacatatatatatatgtgtatatatatatatacatatatatatatgtgtatatatatatgtgtatatatatatatatacacacacatatatatgtatatatatatacacacacacacacatatatatatatatatatatatatatatggccagattataccatggactatgagtggtttctttacaactagaaatagagtcatagtgtcttaaaatctgattatattacaggaccaatttcagacaatttaatattaagatgctattttttaggagtgcataatacttattggaaaataaaaatatttttaaaaggttctatttcttagggcacatggaagaaggagggatgagggctaaaataatcacctattagatacaatgtacagtatttgtgttacggttacagtaaaagcccagagttcatcactgtacaatttattcatgtaaccaaaaaccacttgtaaccctaaatctattgaatttatttttaaaattctatttatttaaaaaatatttatggataccaaatagttttatgaggtacatatgatattttaatacaagtatacattgtgtaataatcgaataaagataattgggatatctatcacctcaaacatttatcatctctctgtgccagaaacatacctcatgacatcaaaatctgtattaataaggattctccagaggaacagaaccaataggatatgtgtatatatagaaagagatttaatatataaaaaaacttgctcacgggagtgtgagcaggcaaacccaggagacctaatgtgcaattccaaaggctggcagtttggagacccagcaaagcaaatggtacagacaaagtctgaaggcagtgttctgaggaattgaatgactggggagatgcctatttttttgttgttctattcaggcctttaattgatctgatgaggcctacctacattaaggagtacaatctgctttactcagtgttcactctctaaaatgacattctcatacaaatacacatcccaatttatcacataaaattcactgtcataggtagaagatggatgctaaaagagttggatacaacttgttgaatacaaggtcaatgtgtccacatgtaaattacttcctaaatacaaaagaaaagcaatgatatcagagaaatttaaattatctcatccaagtgaccagagtataataatacagtaataagttatactggctgcatgtggtggctcagtcctgtaatcccagcactttgggaggctgaggtgggtggttcacctgaggtcaggagtttgagatcagcctggccaacatggtgagacacaatctctcctaaaaatacaaaaaaaaaaaattatatgggtgtagtggcacaccacagtagctgtagtcccagctactcaggaggctgaggtaggtgaattgcttgaacctgggaggttgaggttgcagtgagccgagatcacgccattgaactctatcctgggtgacagagcaagactctgcctcagtaaaataaaataaaataaaataaaataaaataaaataaaataaaataaaataaaataaaattaataaattatactgatgatatgtgtcaccagatgtgacagaagatcatctaggtattactcctgatagttatatatagcctagagtgaatcatgggaaagcaatcagacaaactcaactaccgtctattattcttcaataatagaaaatgctgagaaaatgttgccaaattaaggaacactacaatatatgacaagtattaataaatgcaatgaagtttcctgaatttgagaatagataagaaaatatgaatatgacagtaccttttgacaaaaatgtaaagggtcttagtgaaactgccattgcaaaattagaactgagacagtgacagagatctggcctaaccaactctatcttgcttgtaacctccaagctgtccttgttcattcctggacctaggctgaactaaccttaggaggaactcagtttacagtttataggttaaaacaaagataataacagctctttcccaaaacaaacttccatcttgtctgggactagactgcctttgtaggactaacaaattaaccaaaaaaatagaaattatgattgaggagtcatgcagctgaaggctacaagattctgaccttccccaaattgttcctggggataacatcactgttgtttttttgtttgtttgtgtttgtttgtttgtttttgagacagagtcttgctctgtcacccaggctggagtgcagtgtcactgtctaggctcactgcaacctccgcctcctgggttcacaccattctcttgcctcagcctccccagtagctgagactacaggcgcctgccaccacgcccggctaatttttcttttctttttttttttttttagtagacacggggtttcaccatgttagccaggatggtctctatctcctgacctcatgatccgcccacctcagcctcccaaattgctgggattacaggcgtgagccaacgcgcccggcaacatcactattataaagctgaaaatcagtgcttgagatattttgcaggcccttcattagaggaatcagctggcaccactcgggtggataaaaggtctcatctgatcttgtgtcccccactcaggaaatgacttaagtgcaagatagctatgattccctataacttcatcttcgactcaaccagtgggcactcctgactcactggctgcccccgacacccaccaaattatccttaacaactctcatcctcaaatgactggggagactgatttaagtaatagtaaaactccagtctcctgcacagctggttctggatgaattactctttctctaatgcaatttccctatcttgataaattggctctgtctaggcagaaggcaagttgaacccagtgaatggttacaatggtacctgcaatttattcacaaactgttgagcaaatagtaatgttaatatttgtggagtaaaggtaaagcaagcatggaaaacttagtagcatatgtagttgatcaactctagggctggaaaaagagggccctaacattgctgtcagctagaccaaattctaggcagacttcctcctgcacctaggtctctgatctcttatcccttaaatgatttattttttaaaaaaaatacttgtaattatatatatatatatatatatatatatgtatgtgtgtatatatatgtatgtatgtgtgtgtgcgtgtgtatatatatatatatatatttttttttttactcttttgagatgtaaatcttttaaaaagcctcttgccagttttaaaacccgggaatgtctttctctagatctgggaactgtccctttgaaacgtaatcatcaggaaaaagcaatcctaattcttagtccctgtgggagtttaggcacatataacttcagtgtaacttggagcaaggctacaagacattctgtcataaacatagaagaaaatttactttttgctggagtaaagccaattagccaatacgcatgactagtttacagaaaaataaaacacatttgcaaataatgcaaacataatgtgctggacatatcccagggatcaactgcctacctcacgtcctccatgacttttctactagctcaccccagagtttaaaaacccttctctcctgacttttccaggaaagactgacacttagagtgagagaaatcactagtaagtgttctgtgatcatgatgaggaaatccattgtgagggcctcgggagagctttctccttagtcctctgaatgtttgctaaaaaaaaaaatcaactcccaaatggcagatttatacacgaaaaggcatacaaattctatttggcatgtctacatggaagccttcagaatgaagacccaaccccacaacaaagtacagaagcttatataccatcctgaggttatagaaagaacgcaggctcagagcatggcccaaaaacaggttctagtgttaaggcagtttaaaggagggagaaaagaagaggtttggctagcaaagggggccttgttgtgtagcctcacagtagtagccctcagagagaatagatggtgaaagtttcttttcagacttttgaaagtgtcagactgtcaatctctcctagatgtggaaaaggtcctgaaaagcaaggcctggccgcattaatggagattctctataatgcaaatattccccacaaaagatacctctgcaaggccactctggtgactcttcagcagccatttaaaaatatgtcaaaaaatgcattttggggtaaaatattttgattttcttcaccattatggctttagtctttatttttggtagctagcctagcagcagcatctcaatagatttaaaccaaaaaaacaagaagcatttcaacaattgctatatattcatattataactctgagaaagcagtcatttgcctcctggggaagtttactgactgtatattgtgtattacaaaatgcttttattttttatttctttcaagttgttttgaagatatatttttcatttaatgtattcagttggctgctcaaattttctcttaccatatttctatttcttttctttccccatgtatagttgttttgtatattaactttggctggagacttgaccggtgacgaatctgtatttttttaattcagtcaatgtttaagaaaactgcccccaagctactctaacacaaaaccttttgatgtaatctaatccataatcattatctggaaagaagttaacagttctgataaaatgcttaaagagtcacgtgaaattatattgcattgaaattatatcaataattgagaaatttaaaatgtaataattgttttattcactattaacatttgagaggattgctttagtttgactttttagttctgtctacatgaatcagaaagggatagggttttttctttcttctctcaaaaaacataggaaaaaatttaagaaagagaatattttatattttaatatcgaatactaaaatctggacatttacaccttacatagtctgctttatctcagctaccagcacttggagtaaaaatttaaaagcattttgacattcttctgctgggtcagggattctgtggtagtattatcctatcaggggatgctggaacaacataactgtcaatcatccctagctctgaacaatcaaatccattttcacaaaagctaaagagttactaagtaccccagagcagttccactattcagttggctttttcattgttctttttccatatccccatcttccccccatgtattctcattttgcattttaactttacctgcattcctgaccttggctaccctatatttcattatccaatcaatgttttaagaaaaggcccccaagctaatctaacacaaaacttttggttccatttaattcataatcaccatctggaaagaagttaacacttctgataaatgcataaagattgttcttaaaatttttaaagctatttaaactttttttgcagtaacactaaggggaaagagaaaccctctcatattgttttatattgttttatattcagtacctgttttaagaaaaaacaaggaagtaaaaccaaagaccagcagcccggcactaggcccaaaaccaggcttgggcctgcctggcctaaacccagtagttaaaaatcaactcataacttagaaaccgatgttattcatatattccagacactgtatagaagaacattgtgaaactccctgccctgttctgtttctctctgaccaccggtgcatgcagcccctgtcacataccacctgcttgctcaaatcaatcacgaccctttcatgtgaaatctttagtgttgtgagtccttaaaagagacagaaatcgtgcattcggggagctcggattttaagacagtagcttgccgacgttcccagctgaataaagcccttccttccacaactcagtgtctgagaggttttgtctgcagctcgtcttgctacaataccacaatctactctatcagctgtccatcaagaattcaatgactacttattggtcagtactttctcttttgatgtaacctaaaaatgaatactttgttcctgtaaaatgtctctttcaagattagattgcagaactggcctattagatgtcatttcctttaaagcaaaattataataattttttgtatatatttataaagtatttgaatgcttttgtataatatgatgcaaatattctatttcattttaaatctcatttcaattacttttttcagattaacgctataaacctgagtgcatacgtgtgcatgaatacctttatataatgcatttatcccaagttcttacctgccttcttcctcaaagaagatttagaatcttgacttcaaaacccaactcttggaggcattcttctcaactcctaaaacaacagaataaaaattgggtgtaagagactagaaatgtcaattatgggaagaagtgtttacttttgaaagactaaattcattctgagtgcaggatgattacagaaatagcaaattccacacagcttggggttggggctgaggagaggtatgctggaacaaccaaggtttttaagaaaagatgatagatgtgggggaaagaagggctgatcaagaattagaatttgtatacctttcatgttttgggggaaacacaagaaagaaattgttttcttttgaaattagttcaagagacgtaaactttctagtagatgtaagcatttgatgtacatagatacagacgttttgtaagaaaggtgtacatcaaaagtaaaattctgtgccctctgacagactcagtggatcctcctcttggccaaggggatctcaaacctgaaaaacatgtttagttcatgatggaaaggaagatcagacatgtcttattgtaacccctgccttttggagtttatgcacaattgaccagcattaacattaaaagacagatgatgacactgacaaaatggattatttatagtaataagataccaaattccaacctgactctggtataacatctcatgacagataaaaggtcatgaaaaaaatcagagtattttaccccaaaatatatttctttgaaatatgttgaaattgccctgcaaaggcatccctcatgtgggaaattgcattctatagagactctacttccctttcttggtcttttctgaatccaagagagatttaactaaggctttaacaccttttaagatccaataagagaaatttaccatttattctctctgaagccggctacttagaggcttcatctacataataacaaccttggcttccacaactcctgtaatcttaatgcaaacatttctttctgctgatttaatgaggcaaagcttaattctttgaaccaattgccaatccaaaagtcttcaaagccacctatgtcctgtagcctctttcactttgagatgtccccccattccaggctgaaccaatggatcacttacacatattgatttatgtctttgcctgtaactcctgtctcaaaaatgtataaaaccaagttgcaacccatccacctccaacacatgatctcaagacttcttgggacttgagaggtatgggccataagtcactcatatgtggcttaggataaatctctttaaatattttacagagtttgacttttttgtcaacaatggattttctaaattaattaattgcttctttcataaataaaagattaaatatcgaaaactaataactgactgctttcaagatataaacaagctcatacatttgtggaggaatccctcttgtgagcatggctattttatggtagatttggggtcaagtgaagaaaagatgattcacccactccgagtggaggactttaatgaatgtaaaggagagaatgtaaaggaaccagttcatacaaactttaagaatacacaaggtattttagggagaacagagggaaacacacacagaaataggtagtatgagaacatgattcttctctgcttcgtaatcggtgtgtttgggttatattgttaggggaaaagggtcctgatccagaccccaagccatggttcttggatcatgagcaagaaagaattcagggcaagtccatagaataaagtgaaagcgagtttattaaaaaagtagagaaataagagaatggttattctatagacagagtagacccgaaggcttcttgttgcccatttttatggttatttcttgattatatcctaaacaaggggtggattattcatgcctttcctttttagaccatatagggtaacttcctgacatttccatgacatctgcaactgacatggtgctggtgggagtgtagcagtgaggatgaccagagaacactcccattgccatcttggttttggtgggttttagccagcttctttactgcagtctgttttatcagcaaggtctttatgacctgtatcctgtgctgacctcctatctcatcctttaagttagaatgcttaatcatctgagagtgcagcccagaaggtttcaacctcattttacccaacccttactcaagatatttgttgctctggttcaaaggcctctgacagtactagtttgtttctgtttttgtttttttttttttctattcatattgattttagaattagttcatagatttctacaaaaaaagtctactgggatattgcttgggattgtgttgaagctataatatatatcaaattttgacaaatagcgctcttaataatattaggaattctcatccataaatatatatttattaatatttaagtctttaatttttctttgtaacattttatttgtagtatacaattctttcacaccatacgtataatctcttagtatgtattttatattgttggtgcagttataaatgcattttttcaatttctgatagttcattgctagcatgtagatatacaatgtttgcacatggattattaattttgatactatgctagtaggtttctaaaatagaatttataggatttcttatataaatgatcaagccatttgcaaataaaaaccatattgatgtatattccttctcgcatgcttttcccactttgagatattggcacactccattgagtgcagggtcaatattttcagcctttaaatatgtgaaacttttctaatgcattgaccaaaagtcaactaaatgataatttctgtttttaagagtcttaagatctgtggtagtttgtgatatagtaatatcagaacagatttaaaacaaattgttttattttatgccatactgcactctttagaaggcatgacactatacacaatgcacatttgaaaaatagagagttacctctgctttcttcaaggaagaatatctacataaattattcagaactttttgcatgggggatttgtttattctcactctacttattcaacgatttttatgtcagtatggacttaaggttgtttattatatacttggtgtaacacctgctaatccatctgctcgtaactaaaggcacgcaacatatgcttttaattgatttgataaatatattttaaagaatgtctttaaatgttcacttatcatatatattctcatgattatattctggtgatgcatcccccatacacacatatacataaatttctgataactaagaaatttacctttcttgcccttatctaatgaattttcacttgaaatattaagggggtaaggaaagaaggagtgatgaagaaagataaaggaagccaacaccatagtatttaattggtccattaggcaactcattccttcaccaatttcttagcaaacccaggtgataaatagttaaattataacttatgagatatattacttaaaacaaaaatcccggccaggtgcagtggctcacatctgtaatcccagcactttgggaggccgacggcggtggatcatgaggtcaggagttccagaccagcctgaacaacatggtgaaaccccgtctctactaaaaatacagaaattagccgggtgtggtagctgaagcaggagaatcacttgaaccagggaggcggaggttgcagtgagccaagatcgcaccactgcattgtagcctgggcgacagagcgagactccgtctcaaaaaaacaaaaacaaaaatctctaacccaaattaaccttttaacttttaagcaagtcaaggtttaccagactaatgataaattcaacttcagtcatacgtggaattcgttttctctgtcttttctagaaataattaagaatgttatttatattcacacagtttattttttaaatggctctcttgtttccatacacgatgggtttttatgtcaaaataaaattactacaaaattttaatatgccaaatacagactatataagcacctgaattttttaattcttagttctgtgtctttgtttcacctaacatttttaatcattagttctgtgtctttgtggattttgcttgaagttatgtgctttagatgacatcaattatttttacttttacgtttgtgtaaactaaggttttagctatatttagcagttgtcgctaacacatctccttctacaaagacaatatctttttatactccctgcaagggtcaaacgaactcaaacttaactaaactaaattaaacaacatggaacataggtttgtttgtatctaccacacaatgctctccttttagaataggtcttttagtcttatttctctttttttttttttttttttttttgagacggagtctcgctctatcacccaggctggagtgcagtagcgcgatctcagctcactgcaacctccgcctcccaggttcaaacaattctccttcctcagcctcctgagtagctggtactacaggcccccaacaccacacccggctaatttttgtattctcagtagagaaggggtttcaccatattggccaggctggtctcgaactcttgaccttgtaatccacccacctcaacttcccaaagtgctgggattacaggtgtgagccactgcaccggccctctcttctttttataataatatttgctttttatagttgggctaataaaattgaaattcaaaaaaagaattaactatttatgtaaaacctcacccttttttccctctctgataaccaagagcttgtgctctctgataaagtagtagcatgcacgttttctccccacgctgtgtcctcagaggtttactgctaatttccaaagttgctacctaataggaaagagcacaggactccccagcccagaccaccaattatgttgtataacattaatactaaaaattaattagcttactatcctcaccttcaaaactatagcatctcaattccactccacctcccaatgtttcctcttaactctttgtgttcacgaatgagaatgtcacacacattctatttttagatgtctttcatattccattttctttagcaccaggatgtaattccattgcttagtcccatcaccacttatgcaaacagcgccatctttgaagatgtgttgagttgctcctccaccagtactattaggcaatgagttgtctaatggaccaattacatgctgttgtgccactgctttgtaccactctagtgctgttgtgacactagatgctctgccatgttctaggcaaatatggggataaatacctattccaaaagaagtactctctgtgacttaaatcttataacacattatgtaactttaacctcacttcagagaaagggacatctttcagcctgggcaacatagtgagaccccatttctacaaaaaaaatagagtggcggtacatgcctgtggtgccagctactcaggagggtaagatgtgaggatctcttgagcccagtagatcaaggctgcaatgagctgttattgtcccactgcactccagcctgggcaaaataactagaaaaaaataaaatgatatctttaatttatacctccacacattattttaaaaggatctgagacagtcaggatttggtttacctgggataggtggcaaaggctaagtcatgtggcttaaaaaatatagaatacatctttgtatcatgtaaaagatgtctgaagggagatgttccagggcgggtacatccttctgtcttggtattctgccatcctgttctcagcaatgacctcatagtccagaaaggcaaagatgacaccctgagttcaagccatcatatccacatacaagccagcaagaggaacgcctgattaagggtacgatagtgtacacatggacatacaaagtggaataatagacactgttgacttggaaaggtgggagagtggtgggaggagggatgagaaatttaatttaatgggtacaatgtacactattccagtgatggcaccactgaaagtccagacttcagcactatatgatatatctatgtaacaaaactttacttctaccccctaaatatataaaaaatataaatacaaatgtaaaataaaaagacaaacacacacaaaataaaaccattgaactacattcttaaaaaaaaaaaaaaaaaaaaggccaggcgaggtggcttacacctgtaatcccagcactttgggaggccgagatgggcggatcacaaggtcatgagatcgagaccatcttggctaagacagtgaaaccacgtctctactaaaaaaatacaaaaaaaatagctgtagtcccagctaatcgggaggctgaggccggagaatggcgggaacccgggaggtggagcttgcagagagcctggatcccgccactgcactccagcctgggcgacagagcgagactccgtctcaaaaaaaaaaaaaaaaaaaaaaggccaggcgtggtggctcacgactataatcccagcactttgggaggctgaggtgggtggatcacctgaggtcaggagttccagacgagcctaaccaacatggtgaaaccccgcctctactaaaaatacaaaaattagccggggttggtggcacgcacctgtaatctcagctactcggaggctgaggcaggagaattgcttgaacctgggaggtggaggtggcagtgagccgagatcgtgccattgcactccagcctgggcaacaagagtgaaaatccatctcaaaaataaataaataaataaataaagacaaagtgttcagtaaatattcattctaccatggtgcccaccgcactgatggtaggtttggctgtagaacgtgctacggtcaatggaattctagcagatgtgaagaccagcctcagatggcctctgttctgagcttggcccccaaaataaatagatgtgtagcagaaaaccataatatctagcctagagctaggaccaactgaagaagagacacctaaatgggcccagcccagacccgaagtggagacctctggtgaaaagaaaatttctccttttaaatatcatgaagactttgaagttgcctattatagacagaggtagttgactaatgcagattattctgcctccaacaacctgcatagattttcttcatccaacattacgttggtaataccaccaaggggtatgtttatccgcaaccataaatccaaagcagttcccaagtcctctaacataagatacatttcacataattcaaattgcaaatttcagaatcatcatccaccaggaattgtaatttctttaggaggatatgcattttacctgcaggaggaaatttagtaaacaaagtatgtacttataatcctttcttttattttctgtgcttttattcatgatctgcttttacacctaatctttttttcccttacatttctaaatttgtctgggcaaaggttcaagttttataaacaaaatggccttacaacttgaactctttactgaacatccttatctttattattgttgctgtgtctctaaccaaaaagtaccacttcctttacagctttctttactatggctctctctctctgtgtgtctactgtctatgttattaatgataatctctggatggtcagattaaggataattatatttgtctcctttatatgtttttctgtactttccacattttctaccttgcatatgcattgcttattattgtaagaagttattaaataatttggaaaaacatgcaaaaatagtttagccttttctatttattgaggtcataaagcaattattggaattactttggtggcattaacaggcaaattgattgaggctttaaaatagcttttgctgaatctgtcatggcattttaatatttttagataaaaaaataaagcccaataggatcagtaaaaattattgggttttaatttctagtatcatcaaatttgctgaaggcaaattagaatgccaacttaaaaagctgaacttttaagagttagtaaaagatatattaattaggaatgttcagttcttgacccattaatgctattctttataaatgcattgggatatattcatttaatacttcagcagttttaccatccttgcgatctcatttctcgtttcatgctgaagggctctaatttcttccttgattaaacttttgctatgataataatgaaaaattattttaattatgagaaaacttcatccacaaggatttgatgtctttcttattgtgatctttattgcctctctggatcactccaacacgtttttgccatgtcctagttaaatgttttcttttcctgaaatggaaattaacgtcttttattttatcttaatttgtttgataaagtgcatttattattttccctttttattaaaatcagatgtacaataatttaccaatttagtttataattaatggctatgcagtgatatacagaaccagaaattcaaatcacttatttgcaaataaggacatttgagtttcctcactgtaatgttcaatcatatcataaaattgtgtgtatatctacatagtcatctcctttttatacatgctattttatgtcaattgttataaattagatatgcatctatttgtctgtatgaacaagaacattctcaaattaatttttagtgcccaacaggacagaatgtgaaagaaaaaaaatcgggataatttgattctactatttcctagctctttcatttgctctttaagcctctatccttggcccctgcctctattgccagcctcagtttcttgtttttcaatataggtattaagtgatagttactttaatatggataatttttttccttccttccttccttccttctttccttccttcctttctctccctttctttttctttctttctttctttctttctttccttctttctttctctctttctttccttctttctttctctttctttcttcagatcacttgttcaactttgttgttcaatgttgggaatatcattttttttattctatactctcacccatggctatgaccccaatactatacatcaatgcttctacacttatatcttgagtgtagaccttttattttttcagatacatatatgaaattgcttgaagttgttcttcagtgatgccataaagtcatcttaactcaaatgcaacttagccctctccctcccctctacccttaatgttagtaaatgacatcaccctccaaatcttgagcagccttttaagtttctctttctgacacctatcttttcacaggtgccatctgaaacttaatccattaagtttccaaagtctatactttaaactattgtcatctcaaatttgtataaaagggacattccccttcaatccattatcttcattgcagaccgaattttttgattaaaaatcaaaccagattaggatttttcccacctttaaactattttgctggctttccggtcctcatatgccatgtaacaacttttttttgtcatggctccacaaactttgctatatcttccactttccacactatacgattgttcttctattgccctgtctgttccagatatactggccgtttaaaattcgtattttaccatgccacatcccgtctcgcttcaagtattacccataattaatcttttcctagttaatttggattccttcatcaagtctcaccacaaaatcgctaccttagggaacacaagagaacaggagagtatgcaaggacatggtcgtcataactttgaactgaaatattaatgaatgatataatttaagtacagcattaatgactgtgtaaaattagcaataataacagttaatatttggagcacacttgtcaggtgctgacttacatgcattagcatggattatctagctgctccttacaaaagcccatgaaggcactataagtagcctcatattttacagatattgaaagtgcagctcagagacagtaagtaacttgtccaaggtcacacagttagcaggaggtgaagacaaggggcaaattcaaacagctgagtaatagaacttctgtatgtgtcccactactatgtagtttcaaaatctggattccattgcaactcaaaaatcaagaaaacttgctctgtgtcataacagctatctgaactattgacactgccaaagctaaaatgcactgtaaacgtttcttcaatcacctcatatttctaaatgtcacttctgactttgattaggcaatcttttcttgtgcagatttatcatcatctttgtgttctggaatagtaaaaatcatgtcaatttacatctgagaaaaggcattcaattaaaatttaattagaataacagcatgctcaatttttcttgtaatatctttggtttaatgatggaacaaaatgagttattgacagaaaaaaacaatgaaagtagttttgcatctgcaaattaagattaaaaatttaaaagacaaatatttatatcctctcttaaatgatagtgctaaatcataaacaaaagatgatttaaattaaatgtttgtgaaaaaagttataaaaatgcttacatttcctcagattataatacatgtatacaattaacaaactaaactaaaaaaagaacctgaccatgcatttttaatacatctcatggaactcataatgtttttccctatacccaacacagtctattcaatattcagagaaaggaatctactgctaatgcacttgggtattgccacaataatatattgacataaaagtatattctcagcttttctacttatcacattgtagcctggcaacaaagcgtattttgagtagctctggtttactttgttgtggagtaaatctgttcgtggcacaaaattacagggaggctggtagtgcctctttactctgcaaatccagacaactaagacatttgggaaagattgtatgatcataggcttgtatattaaaaccttttaaaaattacgttgaaacctgcaattttatatgttagacacacttcatcaatcataacactggaaacagtagaattattattcctctaaaagcacctgccgctaacttagtgattagggtaagtgagggattctgatatggtttgaatatggcccccaaaatttcatgtgttggaaacttagtccccagtgcaacagtgttcagaggtgagaccctaaagaggtgattaggtcatgagggcagagctcattcttactgttgattttaccaagagagtgagagtagcttatcacaggagtgggttcctgctaaaaatatgagtttaaccttctccctttcttgctgtctttcttgtacatatgtgcatgtgtgctctcccgatcttctaccttccaccatagtatgacatagcaagaaggccctcaccagacacaggcccctcaactttggacttcccagtctcaagaactataaggaataaatctttgttctttataaattatccagtcttaggtattctattatagcagcacaaaacagaaaaagacactctctatagcacttgacaaattcagtgaagccatatggtcttaatttctaacaaggttatattgtgcaatggtcaaagggaaaagaactggagtttatggtttgaaagtagacaggtagattcacaatataccaaagttttcccttccctgacatttagtcacagcagtgactctttggtgttgggtaaatatttagggttttgagtcagtttagagggtcagagagaggagatgtagcagcaagagaagaaaatagggggtttcaaattttgctaatgggaacaaatggggtcaccaacaaataatttgagaaaaagtgttatcatattttgatattaattagtttgatatactattgactttatacattatcaggtaacatacacattacttactacttactataggttgcaaataatattttcttgcatgaaccataggattcaaattcttcgacaattcaagggagttagttttcatttgcaactagaataaatcacttgacttcataagagtgaacagggaacagatagacactgatgcttatgaagaaaaaacagcactatatagaaaaacaaaaggaatattcccagggtggcattctgacagaaagtatctttgaatgtccccactgcacgcagtgaaaaacatcttttaagacacattgcaagtagtgcttaagtaatatcgttatatcaaaacatgccatcatttaaacttatctgaatcagctaccgatatacagactttcagttatatataatttcaccaatttagtcattttactacagtctatgtcaaactgaatattaatgtcaaaaaaaccccaaaacttcataaaagatgcttgaagatgcataaacatattttaatgaatattttgacattatctaaaattccagacatttataaataatggtttggcattttgatttaatttaatttatttgtatttaaatatttgttgatatataatgtgcatacaggtgtacatgcacaaagcattaatgtaaaactcaatgaattattataagggaaatacatttctgcaacgatgaaatagaatgagctctgttctgcccctgaaaaccattttttccctcttccttcccaaaggtaaccacaatcttaagaactaatgttgtaggtaaactgtctttttatacaagtgttttttaacagaacattttaaacatatataaaatcaacaaaatatgataatagacctgacccccagccttggcaattactaatcatgtaccatttttgtttcatctatagttcaacccattccccgcccctgttttattgttctttctagtcattttttgtgagataagatgtatatgcatcaaatgtacaatcttaactgaacatttttaacaaattaatatgcccccatgaccttttcccctttaaaaaatagaagtacctctattaacaatcattaatgtgcttgtcaatcacctggaaatattgaaaatccagattttgataaaatagatctaggtttttttctgagaatttgtatgtctaacaaggtacggatccatggagcacatgataactaaaaggtctcttctatctgaagtacgtataattaagaacaattgacctcaggtgaaaggacaaatcgaaacacatgtacaatatgccatctgtaggagcatgtggttaataataacatgaactgatgaaacaattttataatgattttaatctaaaattagcaaaatccctattatggtttccatagaaatgctctttcagagtaaaaaaaaatagtatgagagggcaatagttaaaaacagcaaagatttggatgtaggtgtcttataaagtaagcttcagatttggaagtagatgtcttattaagtaagtagtagacccctcttcacactcgtaggtggtctttgcagaattacctcaaattcagtcatttacacatcaattgcacatacttctcatagcttccctttaaaatgatattttaatacccttacaaaatttaactccgtttctttatcaaattaagtaacaaaacttttatatgatattatgcattccatttatattaaacttaaacttacacaactttattaggcagtgtctctgtgtctagtacctgatattccttggggttccgccatttgcacaggcaccacagctgagaagcagggattcaccagacaggatagtccttgcgtctttttctttctcagggcatgagttaatcagtcaatcaagtcatgtgagaatagaccatacattacctagcataaaagtctcattcctgggcactcttctcagaggaggaaaagaccagaaaatcctcttaggggccatttcctgaaacaagagctaagggctctaaggggtcggggctccgatcagaaggtacaaatttctcaggagggaggaatgaggcagtcattctgaacctggatctccatcatcctttgtcccatctcatccaggcatttctgaggggctgttctgaagcatgtctggatggtggaggttggggaacagtgtgggctttgatgggactcaggtaaggtatttcaaggggaggcagaaggtcaatgctagccatctggaatggtgtccttgtaggtagtgggttgcctctttgggttcaagtccaatttcactagagaatgggctggagagtctggaagattcccatctctgatgctctggggatggggtctggaaggagctcagtctcaagatctttgggaaattatggaaagtctgtttgggaacttgggaagacctggtgtctgaatgtttgatttgctgtcctggccacatatatcctttgcaggcagagagctgggtttgcattcacatcaacacaaccgtgagccagaggttgaagtggccatggcccgtatcttggtggcaggctagggtacatcaagagagaaaatttcaagtctgttgacagccttgttctcctgagctcgagtgatcttcccacctcaggctctctagtagctaggactaaaggtatgtgcaaccacacttggctaatttttaaatttgttgcccagatgccggtctcactatgttgcccaggttggtcttgaacttctgggctcaagacatccaccttccttggccttccaaagtgttggaattacaggtgtgtgccactgtccagctgcattttaaatataagaaagttctttttatatttgtgttttaatgttttgaatgtgttcagtatttaattttgtatcatatcacatagctatattgtgagaaataatgagaaccaaggaataacgcacaatttgggggaagtaatatttccttttcaagttaatttgtgtaatcatatagaatgaataaatatttatgtaatggttagaatgacaaaggaggtaacattaagcgtaagaaaataactttgattttttttggacccatttatcctttttgggtttatcacctacttctaaatctctttccaccatattcagataattcactgtgggttctgttgcccattctccaaagtatttttttatttttatttttttgagacagagtcttgctctgtcacccaggctggagtatagtgtgtgatcttggctcactgcaacctccacctcctgggttcaagtgattctcctgcctcagcctcctgagtagctgggattacaggtgcatgccaccgtgcctggctaattttcgtatttttagtagagacggggtttcaccatattggccaggctggtctcgaactcctgacctcatgattcacccgcctcagcctcccaaagtgttgggattacaggcatgagccacagagcctggcccaaagttttttgtatgtgcaattgtcactcctaccttctgctctcaaaattattgttctttgagtttgatatagccaatgctgcttcatcatgctactgaaacctgtgccattaagtgatgttcttggagctgtagctgaccactgtcacagcttttacaagcactagctctaggtatgtaggtatgacaggcctgggcctggagttttgttttttttgtttttgttttttgagacatggtttggctctgtcgttctgtcacccaggctggaacaatggcatgatcgtagctctttgtaaccttgatttcctgggctcaagcaatcctcctgcctcagcctgctgagtagctgggattatgggcatgttacactatgccaagctatgttttttatattatattttatattttttatagagatagagtcttactgtgttgcctaggcttgtctttatctcctgacctcaagcaatattcccacctcagcctcccagagtacttggattttttgtgtaaaccattagccccagcttgaagtgttcttaatactgatgaaacctagcatatatttaccaactggactcagtttcttggaattgcagtttgcagagaccattctgtgttttgtgcttaataagaaataatcccactctcctttaagtgtatttctctttgaccttattctcaaaacaatcctacctttcaatcttaaattttctaaacaatcttttcaattgttggtcttttattttctggagccccgaaccccagcttccaccaccaagtcagataaaagttcattgaggctggtcttgggaacagttttagtgatatttttaaacttgttacttccctctgatggccaagttaatattaatgaaaaaattggtaggtcttattcactcttctctaaggtgatttattacccaagaaacattctcttaaagccctagacatttattatcctgtgaattatccatctattgtcaaagaaaaaagtataaataccagtgactattagaaaaataaaatccctaggcagtattgagacacagctgagatggctaaacatgaaataacaaaagaggaaacatctccatttttaccagatttttgttttgtcagcccatcatcatcttttttttttctaaatatgaaatatgaagtacatgctttggttaatctagacctgaattttttttttttttttttgaaacggagtctcactctgttgccaggctggagggcagtggcgccatctcggctcactgcaacctccacctccctggttcaagcaattcccctgccttagcctcccaagtagctgggattacaggcacacgccaccacgcctggctaatttttttgtatttttagtaaaaatggggtttcaccatgttggccagactggtctcgaactcctgacctcaggcaatacgcctgcctaggcctcccaaagtgctatgattacaggcatgaatcactgcgcccggctgcctgaaatttttttcaggtagttttgacaaaggaaaacagaaaaagcagttgaatgttgccaaaagattgcttgaatcagtgcatcacagaatttaaaatatcagatgcataaaatataagcaagcaaattcagaattgtcttgctaggtaaggagtaagcattcagtgcttaataaaccagacaaaaggacagatttcagcaaaaaagatggagtgttaagaagatatggtgagacctttatattgaaagttttacagttacaaattataccaaggtttacggtatacagacagtaactgatgtggatagaaaatcatatttgataactagaatgatcacacatgttcaaaaacgtggaagagttcacagactccacagaggatactcacataagacttctaacaaaggcaaagaatatggtagagctagaggaagagattacaggtaaacatctgagatgtgagggataaccaggactgacccaccccagagggtttttattcacacaagaacgtacataggctctgaaatgaattgtcaagatgagttgaaaagttgaaaagggttggttttggaggacttctggcaaaagcctccagctgactctttcatgtgtctcttgtctaatttgtaggtgaatactatccgtaaacataatgggcctgagtgtcaccaagagaactttggactttaagcggaacatgatgaatcattaatcaattagtaacttaattaattaaactaattttagccaagcatcaaattctgatgagaaattctgagagacaaggataaatatcttccagtccaactgttaaataactggcttacacaatatcctgcccccatagtgtgaatttgttgaagtaatttgtgttagacaaagagttgagtaaagttgtgtcagctgctaaatttaggaaggaagtgcctagaacttggagatgaaattaatgaggagacattaggattaacagatggtagtggactcaaaggtgccagtatttttatgcaggcatgtagtcatatattgattcacaagaactcaaggaaagtgacaagaaggcttattctaacttccaaccttaaagcttatttttgaacctgagtctgcctttgtaaggattattacagtgagattagtttaattgcctgactccatcttgcttctggcgttgtaggctgattgtcctcgctcattcctgggcataggccaagctaaccatggaagaaatttagtgtttgatttaatgttgaagcaagaataatagtcccttcctaaaactgattctctccttgtttggggactgagactgtctttgcaagattattgaagtctacaaggttgggattacaagaggagcctgaattcaactaaaatgtagatatacaataatcagctattgcactgcgccttgcttttctataaccccttactgctcaggagtcatgtggtcagaggtctcaagtttgtgacttttccagttgctcctgtagatagcatcattattgtggaagctaacattggtcttttgagatgttttccagacttttgtgctctggctcactgattccacctggacccaggactcatgactggactggttctgtggccccatccagaggatgactcagccacaaggatagttttccacatgcctatgacttcatcccccatccaccagcagcacccatttcctagctccctgctaggcaaattatgcacgaaaaccctagactctgagttcttggggagatgaatttgaaaattaacttccattcttctgcttggctggccctgtgattattaaactttgtctttgctgccaaaaacctgctattctcagtgcattggcttttctaaacagtgggcaagatgaacccatcaggtaattatacttgctagtcaatcattcatttgtttatttaatactctctttacaattattccaaaaaaaaccagctaaaaattccctcttcacaaaaaaatgcatgcccttgagttagaaatcatcaagataattctaaacagttgctttatgtagaattgccaatattaaatcatgagctttcagtaaactacttggtaatctaaaacctactttgataattgcaattttataaatataggcaggcaacagtcacaagtttttaaattaaatggcaaatacagtgtgctttatgtttggttacttaaagtatgagctcaatgtctatagcttaataaaatctgaaatttaacttaaagtgcaaatataccttctccatattatggatgatgcactgctcaccaatacatttcacttaaatcacaaaagattaggtaatattaatgccatgagtctttccaaataaagaattttccatatatatgttgattgatagccatgaactcattcaaacctcagggaaaagctgagtgatgtcaagcagttgccaactatgcagattgatcaaagtaatacttcattgctctggagacaatgacaggaactcatgttgaatttgacaggttcactgacattagctctaataagaccacatttcagtgcagctgcattaggctacaaactgaactgctccctgccagtagtcctggaaaaggagaaatgattcatgctatcagatactgcacagacaagcaatgagtgtttactacttgaatgagatagagtagacatgctttatttcctccataatcttctttgaattgcatttgcccaaaacatcccagtatttcaaacaaataaatactacccaaagtatgtctccatgctcacggatcttgcagagatatttgtgtccaggccttatctgttatggccccagagctttagcctttagatccatgacccatgatagcattggatactcctaattaactacacagcttttaatcaaattaatatgctcaaatgtgtgatgtccgaagaaaacagtagacagaattctgagaacaaagattcctgcgtaaatgctgcatagtgaagattgtcattgagttcagccttaatttgatgatttgactgaagaaggggcaacaaaaggagcaaagcatttcaaggaacagaaaatgaaacaaaatcatgaaaatattaaagaccggggtgtgttaaatgttctaagagatgcctgctccaaaaggaactgtttgcaatttaaggctacaaatcacacttagggaggaacacagttgggtgactcaatgagagagattgttaaagccttgggaaggaggaggaaaatctcaatctcagcaatgcatacgtttaaaaaataactgtgaatatttttaaattgtggtatgaaataagagaaaagcttatattttaggaaaagttgatcatttagtattgtgaaaaactgattggagattaaagagtcaggaggagttaagatgactatgacaaagccagtttgccagcctgctgcctctgggtaaatttttattccagtctaagaagttactggtagaaatggaaattatgcaagagacataactgaaatttcaatgaataattaatgtttgatgatctatttagcaaaggagagaataataagggaactttatttttattttctcaagggtattttaattatgaaacaaatattagcaaaacgtgaaatgattgtttttcttaggttggacaacattgagaaacatgtttacttttgttattgaaaggctgcacatgccctcagcttaaaaaatctattcaggatttttttgtcagatttttaatgtatattttatacaatttatttccgatcaaacatttaattatactacctttctatgctgcttttttggcaaatttaaatatatattgtagaaattctaaagagtatcataaatcttaatttctctatcatatatcttcaataattacatctattttgccgttttgtataagttatatctccactcaatcctctctccctatcttaattattaatattttagatgtttttctaggtgaaatttatttaattaaattaattgattaattattttttgagacaggatcttactctgtctcacatgcagtagtgcagtggcgtgatctcagctcactgcaacctccgcctcccaggttcgagtgattcttccacctcagcttgccaagcagttgggattacaagcatgagccaccccgcctagctgatttttttgtatttttagtagagtccgggttttgccacgttggccgggccggtctcgaactcctggcctcaagtgatctgcctgcctcagcttcccaaactgctgggattacaggtgtgagccaccacccctggccctaggtgaaatttaaacatcgtatctcttccaccaacttttagccttctatgatgatttttatttatctggcatatttttatatattatggatattgaaagaggaaataagttgtattaaattttggcaaggaggaaaataagatgttgaatacaaagattctctgaggagaatgtctactgataaataagaaaaccgtaaggtgaaaagatgttgttaagggaaataaaatcaaaggcccactcacactcttcaaaatgtcactaaaacatagcggtattcatcctcttcctaggtaatttaagccaggctaatctacttacagaattatggatcgttaaaataaattgccagtatttgccaattttcaaggtgaccaaagaggactcagtttgtctcctgttgctctttttgtccttgaggttgtatgatgtctctaagtcttgattgttcactatgagacccagtcccagccccttcttcactgctgatattgttctcctcatatgttcacatttgatgggtagatataaaatataatgctgcctgcataagccactcctggtggtttagacctagtggaggcaattaggtaggtagcattatattttcctagtagaacttttgtgcacctcagtgattcctaggagagaatctagcattactactactagcaaattaagaaaaaaagcaatataaggacagaataaacatcgactttcattaatttacaatatagcactgttcagaaaaaaaaatatctgtggtggatacatgtgaagatcttctataattttacgtgatagcctccaaactaacatttaagccactcgaattgtgaggcaatatgatattcattagaagctgtgccagctgcaacaaccattagtttgccatcacatgaaaaggcattcaatgtttccactgatccctcaggccctaacacagtctttaatgtacaaatcttcttagttattcatcctttagaatgtttaggtcagggaaattttaaaagattttgaaagaatatagtaataatgatcttgccttctctatgtaaaattttgaatatttactagatgtgtggcctgcttaagcactgaaatattttttaagccatgtgaaatcttcgtgaaaacgggtgagaagtatatttttatagactttgagatgtaacaaaaaagactcaaactggcttaaaatatagagaattggctttaaatatagagaacatattacctctaatttcaaaaattgccaacgtagatgataacttcagaggtccaatactatttacttaaaaagaaacccccaagttgttttccaggacagaacagatttctcctcttattttaatgacgagaatgtgttcacttattcttttcaatcgatttctgagagggagccttgagttaaagataaagatgggatgaaaatcaaatataaagatggagtgagtaggcaccaaatggtgtgtgagtgctatggtaaatttaatcatcttcacctacaaataaacaagttaaaacttacaaaagttcattcttacctaagatctaccaatttatgactgttaaagccaaaattgagaatgattttaaattttatccatatttccccagtataatctatttttaatatattcattaagtttagatgtatttaaaagctactagataaattatgttagaccttgaggtttaaaaatgagtgagataaccccacaatgaatgtcatccagaaaggccaaacatataatagattgcatattaacgaatggatgttaagtgaaaagatacaaatatgccctcacatgagactgcataggggaggtgttagcagcagtgaatccatacaggtatgcagcaactcaattatagtctcctcaaaggaaataattcgtccaaggggcataaggcagagtgagagactgaggcaagtttttgagcaggaatgagagtttatttaaaggttgcagagtggggtgggcgtggtggctcacacctgtaatacaagcactttgggaggccaagacaggcagatcacgaggtcaggagttcgagaccagcctggctaacatggtgaaaccccgtctgtactaaaaatacaaaaaattagccgggtgtggtggtgtgcacctgtagtcccagctgctcaggaggctgaggcaggagaatcgcttgaacccgggaggtggagggtgcagtgagccgagatcacaccactgcactccagcctgggcaacaaagtgagactcagtctcaaaaaaaaaaaaaaaaaaaaaaaaaattgtagaacaaaaacaaaaggaaataaagtacacttgaaagaaggccaagtgagcaactttagagattcaagtgcctcgtctgacccttgacttggggttttatacattggcatcattctggggtttgcagttcttccccccaaattcttcccttggagtgggctgtccacatgcacagtggcctgccagcacttgggaggggctccatgaacagcgggttttctgaagttctgcacatgctcctctgaggcgtttttcccttacctgtcaagcgttcctaaaggaaggttgtataccagttaagctctgcctttttgtctcttagtgcacatgcttgagcccactcacccagcttctgcgatcttatcaggaagctgctgatcaccagcttcagttgttttcttttttctttctttctttcttttttttttttttttttaagacagagtctggctctgcctcccaggctggagtgcggtggcgcgatttcggctcactgcaagctctgcctcccgggttcacgccattctcctgcctcagcctccggaagatgttttctatctgttgagagactgcctttcactggccctggctgcgaccaattattattttagaaggacaatttaacaacggactgaccatcacgtgatggtcgcctgacactcctggaggggccctttcccgccgtgctcatgtctgcctagctacctactctaacagagggacatataacaaagtgcaatgggacttgaaggaaaggagacagatgacctgaatcacaaagaatgagaccccacatttattgaagtcactgggaatcatctaacagaaaaacatgtgcatctacagctaatgaaaatgttattttctttctctatccctattcctgattttacgtacttttgtttttcattgttcttaatatttggtttagtttgttttgagacttacgtaagagctgggttttatggctttaaaatctctacattaaccatggacatttatataaatttatcatatgcataaaatccgaagaagaaaatttatgtactcatgaaaatgaatgatctatttaaaaagaaagcaaattgaaaatggaaatggctataaaattatttcattggtcaactggcaaaatactctcagcaatttttctgacctatgaatctaagcatttttaagtatcattgcattgttatataaattctacttgtattatgccagcagatttcaaaagcctctcttttttttgcctattgtgaaggtaggaataagatgttgtatcagaaatccacagttgcttctgtagggaaggaaaaaaaatcttttttctctacccattttagttacaagtttgaggctctgtaatgtagactaacaaaatgcagattaacaaaaaaaaatccaccatgaagtttattagtgtgcatattgcagttacacatgggaacacttagtgatgaggaactcaaagggtgattataattggagtttatatagcatcttaacaacaaaaaaaaatgtaaatttttagggaagtgacaagataaaaaaatcaagactgagtttttagggtagcaaacagtagaaaggtaaatacatggaggaaactaatggaagaaagggcttgtcatgcaggctcttctagtgctatatctgggctgatagggtttagagttgtcacagatgactggtgattggtgattaacttctttccttctacatagagagtagaggacacctttataaattttcatcctgcttttaagcaaatgcgggaaggcagacttttcttgtatctatgtctcaattgcctttagctcaaaataaacctatgtcaaagtggtatattattttaagatggtgtattctgctttccttcacttgaaactactcagtaatcaattacaaaaccagtaagaaattgagagtaagttttcattatagaccttgccaaatataatagctcataaatcagctaataatatttatctgtgttatatattatcaggtacagttaactcttttttttagaatcttgttcattcaaataatttatttagaagtaaacaaaagtaaaaatttcaaagaaaagtcaaacaaaagaaaagaagaagaattttctcccaggatatgtaactcatttatttataaaaccattctctcaaagtatctaggattcttgaaagaccttgttttgctttctttgtttgaagtgaagagctgaaaataaaatcaataggattactcctcctcaaattattcttggaagaggcaaataagttctgcctactcttcagccttaatgaagaattgaaagcatcaaaactagtcaaaatttgaggcattaatctctaaggaatgttctgacacagttcatattcacaagttcctattatacggttttattttaaaatggtgaaaattattgaaactcagatgattaaacagtcttcaaagcttgagtaccttatacactttatataactgctatgaatattctcttgaatgctagtggaggaagggttatccacagctattgtagaagttttagggaatcacattctaaggattgcacaaaagaaaattaataaagcaactgctagaaataaacccacatcttaagaacaatttgacagaaaggagagtctcccaacaattgatgtagaatatctaaaaagggaataaaaatataggacatagatcttgggaaaacagtatttctcaattagcgagatccagggaatgtgcaacttcattcttttgttttaacatgaggtcttcttagcaggcatatattcccaaatcagagacagaggcatttagcaccattgacagccaaatgtcgttaaatgttatattaatataatttatttccttttacctgatgtcatcctcccgcaggcaaacttctgcttaaactgtatctttcatttgttttctgtaattaagacatttgctggttatcctaatagattttatactactcattataattcagcaaactgataggttttatatcaatttttgaattttcctaatatgagccaacttttgagagactgaaactatcttaatagtgccataacaggagagctaaaaaaaatacccagactatgaatagtgataaccacttttacatcaaaccagactattcagtaaacttctgccaggaaaaaaccaagttcacagtcccctttcaaatcacattatttacacaatggacaaatcaagaggaaggattaggcagagtataagtatacattatggcagtcaaaaacactctttttgaatgctttatttctctgtaaagttaatgtgtaaagtcacacacaaagacacaccctcattcatcacccccatgtgattaacagagatgttcatcacaacagtattatcttttatttttaaaatgcaagtagattatctgatctttactatggaaaattctcatagaatagtagaaggaatttcaatttgattaaaagatgaagcagattcaaatgaatgagaaatgtataagaggcagattgggaaattggaggcagcaggttcaacttcttagctgtcaaaatctgccccagttctgacataaatttaatcattcatagactaatagagccatggcttcaagcactgaaaagcagctacgactttatcctgcttccaagctaacaaggtagttttcacagcttcatacatgttggcaaaggacacaaggctcctgggttagacacaatggccttttttacattaaagcacagcacgtagcatgagtttcacgttctggttgactcctgttatccccatgtcccactaagcaacacagagcagcccaggtagctactgcagacaaaataggcttatattactaataagaaacccccaatctttcaaaaacagatgctaacaaacgtggccagccatgcaccttaaagaaagccgttttcttttttattctggaggaaaaaaaaacaaaaacaaaaacacttttcctctgtcctgaaggaagataccatttctatcctctaaggctgtatgaacatatttgaacatacgtaataggataaatgccatcaatgactctgtttagaagacatgcagaaacacaagaccgattgagatttgtctctcaactcatagtcaatgttcattgaccttcattgtaatgtagacatacaattcaggtggaacaataaatacgtaagggaggttctacagaaaaacttcatgtataatgatatgtttgccttcagtggtctttttttattttctatcttctaatatatatatatatataaaatatatatattcactaaaaactttgtgatatatatatatatatatatataaatttggcaatgctatctctgttttcttgttagaaaaatatttagaaattgaaaattcaagtctgtagactcctaggtgactcttcatatcgtcaatggctagtttcatgactcctattcttgtaaaaatacacggcaccatgccatcaaggcataattattagaaaagagaaataacaccatatgtgtccaacgggttattacaaactcatgcctgcatccaaaaagttatttaacttcagttttcaggatctcctttacctgaacatggctctgtgtcatagagtgccttaaccttggtctgtctttttttgtcacaaatatacaatgtataagatgagatacttttgactgcagttgccaaaaattttgggtcagctaagatgcggtgatatttttcatgatgtccactacgccactacatcccttctgtttctcttccctatatcctatcttttctatttccaacaccataattttacagtcaaacttatcgttggcttctttaaaatccaaattcctgaatgtcaggggctgtaaaatttgtttgagaagacctagctccataaagttcggtcagtgttcattaaattcaacctaatgattatgcagtttttaagtacagctgttttccatagtaacctgaacattcgactagcaggaaggcaaacatattctatttgatttatgtttatttaaacttgaccatggttttgctttataataaaaacagtgcaaggctgctatagtcctttcaatttataatagagtaattttacctaccaatgttaaattaagtatttgactgcacaaaaaacaaggaaagatctttgcttccctacagactgcaggaggcttgttggctgaaagctcagcacaagagaagtttgatagcattgatcactgactatcagcagatcattccaatattcatggtaaccagcaactaaaacagtaggggatgtccaaactgtatcttttctcctacttatttatcttattttgtgtcccaataggatattgcagtcgttgtgttctagactaaatctgatgttactgagggtctcctcatgtatctgcaggtgtgttataactgagagaaaatagaaagcattttttttttactctatactggtttttttattttattttattattgttatactttaagttttagggtacatgtgtacaacgtgcaggtttgttacatatgtatacatgtgccatgttggtgtgctgcacccattaactcgtcatttagcattagcatttcttgtcattactcttttaattggatctcactgggtgaactatcagtaagccaaaaccattgaaaagtctcaagacagtatatgcattatgaaatggcaaaccaaagtcattattgggtgtagagtattttcactaaaaaactttgtaattagaaggaacatagtgattatctaatgaagttaacctattttataaatataagggattatctcatgaacttaaccaatttttaaatctgaatttaaaaaaagattaataaaatagttacctcaccaaaaatttaaaaaaatagcaaatgccatctaaatcctttatattccacaaaaattgtttttctgagttatttccatgaacagttctctgactgcattaatttttaagtgttgatatatttaacaagataatacacttatatatgttgaaaacattaaaaagttaaatggcaaaagatctgtttgggatctatacttttcatctgtcctggtcccattcacatacactagccattgtggcagcagctcactttactagtttccttgtgttcattcagaatttctatgtaacgtatttgatgttcccattcttctatgcaaatgtagcttataatgcccaaagttctggatatttaaaccctaccaaaatatggtggaaatggttccttaattcatagactgtgtgtgtaaaatatacacacatatatgtattatgtatcagatatgagtatatatgtgttttatacaacacatactctctctctctctctctctctccctccagcatatcatttaattgtatggatatctacattttatataattattctacaagtcttagatttgtaaatggtttccttttttttgctattgtaagcattactgttttgaacatctttgtacacatattactttctttgtgtgtacatattaaccctagggcaaattatcacaagcgagggtggtacatcagttatgatatatttgtaatttggttttatacttccaaattgccctttgcatggtcagttttgcaacacagaggtgtgttggggggggcacatgtgcacatacatgtcttagtttctcattgtatcttctctaagtttgggtttagaatgtttctggcttgttagtttttgcacagactttcatgaccatacatatccattgtgaatttccccatatttctttatgaattctaccttataaagccccttataaaaccatcagatctcttgagaactcattcactatcacgagaacagcatggaggtaaccactcccatgattcaattacctcctacagggtccctcccacaacatgtagggattacgggaactacaattcaagatgagatttggatgggctcattgccaaagcatatcacccgggttttctgaatcaactttttaaagaagtatccttttattcaatgcatagttgagtttggctttttgattcaatctgaaaatactgttaatttagtgagttaaaccacatcatagtgactgaaaagaaagttatagttagcttgagttgtgccatattgttatgaattatgttttctgtttatatgtctatcatgttatgtatgttgtttttcatttgtttgttattgtgtatagttttttcctgatatctaagaaagtttaaaagtttgatctagtggttacatttataattacaatttcaataataccattagttaatttttagaagatatgtattaaataattagtgaataaattttctctttttttcttgttcctcatttttctccactacatgattttagtggatttaactatctttatatactaataaatatgattatattacttgacttttcaactgtaaatagtcttcaacttcccattctatcagaggaaggaggaattatttacccagtagccttttttttccttcaccaataacttttacagttacgttgtatttacattcttattcttaattccacggtaatgcttagttccatggtaatttattcttagttccatggtaaatatatatgtattttttgtgtgtgtgtatatatatatatatatatgaatatatatacacacgcacacacacacatatcttaaacttactaccagtatttttgccttgtttctccagacattccttgtttgtcttatctagaattgtagaaatttctaggaacccgaaaaaaaaaatacatatatatatatattatttgagaccaagctgctttatttaagacgaagtctcgctcttgttgcccatgctggagtgcaatggcacaaatctaggctcaccgcaacctctgcctcccaggttcaagcaattgtctcctgcctcagcctcccagctaatggaaaaaaatattttctgtatgctcacatttttaaatcactttttccctatgatttatacttgaagagcagtttactttgatgaaaaattattgacttatacttactatttttgtgtattttcttggtaagtgtgtctttgaagaaatatgttagtgtattttatttcaagggaggtttaatgaataattttaaatgatcattttctattgctgccctgttttcttcatctggaactctgtacattaatcttttccttctgtcttctgtagactctctttggtattgaacgtctgtgtttcaggttacagtatattatatgacaataatactctgagcattttattaatctaaaacaaattatacttttttgacattctgttagctcttactttttcaagtagttgtattttgtctttgaattttttaatttctggtttgctctgctctttcaaagctgtaattttatacatagttaaacatacacatacacataatatgtattgtataactaaatatacattgtacatatatgcatatgtatatacaaatgtgtgaattcatatacatgaattcatatacatgtgtattcatgtgaattcatatacatgtgaattcatatacatgtgtgttcaaacataaatacacatggctacctattttcatatatatacagatattaatactgaactgtatatgtctttatatgtatgtatgtatatgtgtatgtatgtacatacacatttatgagtttatttcacatccacagaaatgtatatgtgtgtgtgtagcttacataccttaaatgtgtgtatatgtctacaaacacacacatgcacacactaatactgtttcatctcctctgatacatgatagaaataatttgtaagtacactttgccccttttttttctgaatgcctctatgtgtcagcacagtccaagttcctttcatgttgctcattagtgatgaagcttcagtttgtcagactagcaaaatgaggaggactcctggagtatgagcaagggtcatattaaccttccaatcttcactacctaaacactcctttgttctccgttgcacagagattgctttcaataaacttggcctgtgagattgattgagtggctccatcttcctgcttcttgaaccaaaacaaacgtagagagccacttccactagcacaattcaccccagtttctatggtcagttttgcaagagagattgcactctgaagtcttcacctccaagaccatctaatcaattttcaaattgtgtatgtgtgcaaacaaactctttttctgtaagggtttctcttaatatcttagttatggcaatctttatttgtattctgcttgttgtacattgaacattgtattcatcctttgataactgataaattctactttttttgcattgtcatagtaacaaaactttgtcatggaacattgcttcccacaactctaactgtatattattatttttaaaaaactttatattttgccataattttagttttcagaaaagttgcaaagataatccatagggttcccaaatacttctccccgtctcccttaatattaacattttatgttactatgagaaatttatcacgaccaagaaataaatattggaaaattgctattaacaaaagttcagattttattagagcttcaccagtttttcaatgattatgtttttctattccagtatccagtccaggacaccacaccttgtctccataatttattgtacctttgacatttcctcagtccttacttgttttcaaagaccttgacaattttcagaatcactggtcaggtattttgaagaagtctcctaaatttgagtttgagaattttttttcatagtcagactgcatttacggaattttgtgacaaatatcacagaaagaaagtgccatttttatcacatcttatcaggtacacattatatcaaaatgatttaacacagattgtgttaatctcagtcacttggttaaggcagtgtttgtcaggttttttccaatataaagcaacctattttatccccttactctatggaagcaaataagcaagtccagcctatactccgagtgggagggattctagtcaatctcctggaggagaaagtatctacacctgttatttggaattttctgtaaggatcatgtatcttttatcttcatttattcatttaaaatcatataatactatggacttatatatcttaattttttatactgggttataatcctatacttctttatttattttgttgctcaaatgtctcacgcttttggcattgggagcttttcaggttggctctggtgtccgtttgacatactctcatccttccgtctcttgattacttccttgccttctgccattacaggatatgccatgttcattctgtattttgtcttcccttgctatagatttgactacttctcataagcatctttgattctttgactgaaaaggtatgagaatcaagatctggtctctgggtttgcctgttgagcagtttataaaataggagcagaggtctggttctgatgatcttggcttttgctataaatctcaatcttcaaagataaagattaaaaatatccttattgtggaagttatattaagtatgttaatctgcttgggctgccacaagataccataggtttggtggcttacaaaaacaggaatgtattttcttgcagttctggaggctagaagttccgagttcaaggtgccagtagggtttctcctgaggcctctctctttagtttgcagactacttgctatgtcctaggatggactttcctttgtgtagtcacacatggagagagactgggagatctctggtgtctcttcttctcataagaacatctgtcctattggatcaaggcccagccttctgaccgcctttaaccttatctccttaaagattccatgtgtaaatacaatctcagtgggataagcattcaatatatgaattctaggggacacaattcaatccaatatgacagggagagaaggcagggaaattctgggcagaagagggcaggtccccagcaagggccccaccctcaagctgaaaagcctggaaccatggcctgaagggagaacttacagccctgtttttctgcttcaatgttgtcttttccaaaacaacccatggccctgccctgcccccatcctgtgcccataaaaccctcgagctcagacaacatggagaggagaaggaactggatgtctgaaactacagtcagacatcagagagaagcagcttgacttcagagggacagcttcacagtgtagcttcgaagaggagccaggctggtgagggccggactccaggggaagattattttctggttacatcctcttttcagctccccttcctgctgagggccagtttcactggcaataaaatcccccacaattaccatcttcaatttgttcatgtgacctcattcctcctggacacagggcaagaactcaggggccacaagtgtgggtgctaacgtctgtcacactgactctctccactgagctgttaacactgaagccatctgtggatggcaaagctaaaggggcagtgtaacacttcctctggggcttcagggttggtgggcactctctcctagacactgccatgggaccagcatgaagttcactcttgccagcacccaaaagcgcttggcttggctcctgcacctgcccacctgcactgcccctcccgcaaggaatggagcagcgagtgagtggagttcatccctgctgtgcccgtgcacttcagttcctgcctgcaaagagttcagggaaatattcagtttcatcaacattgggaaaggcattaaagagttgaagagcaatgcacttttccatgccttgcaaaacaccatctatacaggaattgataaccagggaatttggctgcttcagcagtagaaaaaactaacaaatagtctgagttgaaaatatggctttaactttttcttcttgttctatgtgaggtccttaatacattaaccatagtttgacatataatatatgaccaaaattttattttatatttttattttttgaggaaactttcctctgatacatcaatgctactgtaggaaatgaaaatgcgaatgaaaaattaaacattatctaccactgagggccttgagattactttgaaacagattatcagcctgtttaaagaaattatgaaaaaacatcaagttatttctgttttctttggcaattatattgtattatgtgtgctcttcaaaataccagtagaagtgcttgcctttccctgctacagtaggtaagaaaggcaccaaattgaatataaaatgtgatcactttttcttttactctccttctttccacagactttccagtaaagtcaaaacaaacaaatagatgtttcattaataattttatgagtgcttttgtaaaatctgataaacatttagaaacaaattaagggaaatgaacaaataatgagaccaacagatgcacacaacaataaaagcaatcaacattgattctagttttgcatgatggtccttggtgtcttgtctgtgttttctgatgattaatgcctcaggaaaacaatttacagaaatcagtattgcaattattttctgtatctttttaggggttagagacattgctaaactgtaactgacaaagtgataaatctgcacactttacaaatctatcaattcttatgttttatttaactattttcaaatgcagcattgtgtgaaagctactgcaataaacattttattggaaaaaattcaaacacttaaaatatgtgctatattttaagaaataattcagtgatacatataagtcaaatgattattttctgttaaaaagttaaatacagtacagtatgtacttattgtactagtagtcaggggcagaagtgtgggtgctaacatgtttcaggacaaatgtcactagaatatcttcaaggcctagagtctgattagtaaattaaaggacatttacttatgaatgtttgtaatatgatatctgcaaatttccttttacatgaaatttgaattatttttaaagcaaaactcagataaagttatttcatgcatatactatttaggaaatttgctttgctttacaacatctgttttaaagacagtatactacacattttgagagactgaacataggtaggacacataatctatcctcaaatttttgaagcttccaaacaagtttggtaaggtcatgtatttcacaatgcattacaaattgcatatttgataaacacatgtgcttataatttgtcagacattattgtaaatattttacatctatgcccttaaaatgccctacacaaagggacaaagacatggagtcacaaagctaggatgcaaactcagacaaacagctgagcctactttcttaaactcaatactattgttcaaaatctactccagaataggcattctaatgggaatatataaagcataaggtattcttgagtgattactagaattatcaatagaaccatagacagaaaataagactggaaatatactgtttttatagctatgaaagtcaaagaaaagaatttgagttgaatctgtcatcactaataaaaatttggtgggggaagaaaagtacaagatgatttcttagcacagtataggtgtaaatttattcggttaattaattaaatatttgcttattagcaaactatgtattaaatgcctatcataggttcaggctttgggatgagccatgcaataaaaatgagaaaacaaaaaacactggaatctatggaatactaaatataagtaatattgggactcatttgtgcttctggcagagagaagaaacacaaaccaggattatgtaaccatcatacccaggattaagtttacatttatattcatcttctgacaggacacatgagatgtctggatcagaaaacagatgttttattactcccagcaacataagtagccagagtagcatcttgcattgcattggttctttacactcaagtttctcattaggtgaaaaaatgaagatattcacctgtgtatgtagtggggtttgcactaccgggagaaaatttgaaattatgagacctggagtttatctagggaagctggcacattggcctgtcctcacttctcaagaaagaaggacaaagacctttgaacgaatcatctctgtgagggaaaaggataatccctgggtttaattaatctcataatataaacaaatgtctccaaaaaagactgggaagacatctatgggtttattgctttagaatatgatatcaggagctccaggattctcataggcagaatccatggggatctttggctcaatgttaatctgtatatgcatagaataaaactatgtggcaatgaaggaaatacagaaataccataaactgaagatcctcagagttcacactttggtagatatttgactttttccaggcagaggagagagaacatttagaataaatgggacaggccaggattggtggcttatgcctgtaacaccagcaatttgagaggccaaggagggtggattgcttgagacgaagagtttgagaccaaccggggcaacatggtgaaatcccttctctatcaaaaatacaaaaatcatgcaaatcaaaaccacagtgagataccatctcacaccagttagaatggcaatcattaaaaagtcaggaaacaacaggtgctggagaggatgtggagaaataggaacacttttacactgttggtgggactgtaaactagttcaaccattgtggaagtcagtgtggcgattcctcagggatctagaactagaaataccatttgacccagccatcccattactgggtatatacccaaaggattataaatcatgctgctataaagacacatgcacacgtatgtttactgcggcactattcacaatagcaaagacttggaaccaacccaaatgtccatcaatgatagactggattaagaaaatgtggcacatatacaccatggaatactatgcagccataaaaaaggatgagttcatgtcctttttaagggcatggatgaaactggaaatcatcattctcagcaaactatcccaaggacaaaaaccaaacacctcatgttctcactcataggtgggaattgaacaatgagaacacatggacacaggaaggggaacatcacactccggggactgttgtggggctgggggaggggcaagggatagcatttggagatatacctaatgctaaatgacaagttaatgggtgcagcacaccaacatggcacatgtatacatatgtaacaaacctgcacattgtgcacatgtaccctaaaacttaaagtgtaataataataaaaaaaaaatacaaaaatcagccaggtgtggctgcatttgcttgtggtcccagctacttgggaggctgaggcaggaggatcgcttgagtctgggaggttgaggctgtaatgagccatgatcacaccattgtactccagcctagatggcatagcaagaccctgtctcaaaagaaaaagaaaaagaagaaattagaataaatgggacagtcaataaagaggctaaaggcatctagtcttaataataaagttaaacaattgctagaattaaggccactttatagttgttctaagtaaaaatcaagctgctatgaactgaacgtttgtgtttcttcaaattgcgtacattggtgcttaaatccccaatgcaatggtatttggaagtagagcctttggaagataattatgtcatgaaggtgaagccctaatgaatagcttagtgacattatatgatgagacaaaagagaagtgatctctctctctactccctgccacgtcgagatacaggaagatggctatgtgcaaaccaggaatggggtcctcatcagttactaagtgccttgatcttggcgttcaagaatccagaactgtgagaaataaatttctgtggtttaagccatccagtctatggtattctgttactgcagcccaaactgaaacacatgctgatctgcaagaaatttaattgactggcaagataaacatgaacacttcttaaaggaagacagttaaatctaaaaactcaacaaagtaacactcataatatgtggcatgaaataaagtttagttgacatgtgaagaagtaacagtgttatccataattgggagaaaaatctgtcaatagaaattgacacagaaatgtcagagatgatggaattaacacacaagctcattaaaaacttattaacgcaaagcttttaaggaaacactgaacatgatgagaagatacatttaaattacttttaaagggaagtttgtgagttgatacatataatgcaataaggaaataaatcatcagattaatttataagcagatatacaaaggagaataaaatgttagttaagttagagacataacaatagaaatcacagagaaaaaatattttttaaaaatgaaagagcctgatggtatataaaggaatattataacactgaatataaacagaaactgggaaagaaatggatgtcagaaaatatttgaataaataatggcaaaacatttcaaatttaatgagagttataaaaccatgaaaattataaaatctattaagcttaaaaaacaaggaaacactagaaatatattaaaaaatccaatcaagacacatcaaaatcaaattgctgaataccagcatcagtgagaaaattttatgatcatggctaggaggaaaacacatacattcactaaaaaataaatacaagtgagatcagaaacattgctgcaacatgttaaaacagaagacaataaaacagcagttaaaagaaccagagaaagactgattcatcgagattgcctttcgattaaaatgtatttcaaaaaggaaagagacaacaagaattaaaaatatggaaaaacccctaaaactggacactagaaaactttcatatcaagaagagtaagttcttcagatgaagaaaataatataaggcaatctatgcagaagggaaacagaaagtcaatagtaaatatgtaaccaaatataattttttttcacaactttgtttctttaaacaagaaagaaacaaatctattacaggattttaaacaaatttagaaattaaagataccataaaaacgtcaaaaaggatgaaagggatgtttgtatccattaagttgtataatattatttgaaagtagatgataatatgttaaagatgcagctgcagtctgtagacaaaccactaaaatgtgatataaacagatatctctaataaggcattagtggatatgaaatgaatactaaagaaaataatcaaagcaaatgctggaagaaaattgaagacagaaatatgacagaagatagattttttggtaatagattttggaaaatagattttatgtcagaatagatttttttttttttaatgagagaaagatgcccaagtatttattgtctacaagaagctcactttagccgagattgtgccacgccactgcactccagcctgggcgacagagccagactccgtctcaaaaaaaaaaaaaaaaaaagctaactttaaatataaagattcagataggcaaaaatgaagcaatagagaaaaatatatattcttacattaacttcaagaaagctggagaatctatattaatttcagagaaaacaacttcagaaaagggaaaattatgaggaatgaagagagacattatatgacaaaatgattaattcttaaaaaactcataataattaataatgtgattgcacttgaataaagcattaataattatgatgcaaaaactaattaaaaaatggagaagtagataaaaccagtattgtaattggagacttcaacagtcctctagtagtaattgatggacaagcaagcataaaataggaatacagttaacctgaaaagcactattatcaacttaatttaattgatacatttagaacattccaccacaggaaaagcagaatgcacattcttctgaagttcacatggaacattaattaagacagactagtttcttggccataatgcacactttaacaattttgtataaaaatagaagccacacgaagtattttctcaaatcttaatgcaatttaactagaaatctataatgaaaggtagctgaaaaattcccaggtattggaagttaaacagttagacttctaaataatacattgatcaaggaaaagatctgaaaataaattttaaaatatactgaactaagttaagataaaatacaacaactcagatttgtgggatgcagcaaaatcagtgctttgaggtaaagttaaagcattaaatggctgtatcaaaaaagaagtaaataaaataaacactctaagcttctgcctaggaaaaatagagaaagaagatacatttaagcctaaagcaaacagaaaaacagaaaagaaataagttagagcctgggctataaatgcatatgtgtgtatatatatgtgcataaatgcatatgtgcacacacacacacgtggattgccaggaagagcctttgtaactgcctttggtcaggccttaaaacaaaacaaaacgtacacacataaatttttggccataaactggattcctcacaggtcttagaaaaaatgaataactgtaaatattcattttagaaaaaaattagaaacctaaaattgatatgctaagaatataactcaaggagtgatcaaaattaaaataaaaaaatctaaagactgtaggaagaaagatataagtgtagaaattaattgaaaagaaatggaccgaaaacataaaatatttagagacactaaaacatgagaaaatctcttgctaatggttcagtgttctactccaattagtctttttgcagtaacaaaagaagaacaaatcactttagaaataaatacatacatgaacataaaacatacatactagtaaaatatgtccatgaagaagtagaaaatatggataatcctttagctgacaaaattttggaatcattaaaaagcttcccaccaaaaaaaaaatgataatgcatagatggttttctaaatgaatttcagccaatacttaaggtataaaagttttttttaaaattttttatttccacaggtttttggggaacacatagtatttggttacatgagtaagctctttagaagtgatttgtgagattttggtgcacacatcacctaagcagtttacactgaatgcatgtattagtctgttttcacgctgctgacaaagtcatacagaaactgggaagaaaaggaggtttaattggacttaagagttccacatgtctggggaggcctcagaatcatgggaggaggtgaaatgcacttcttgcatgtcagtggcaagagaaaaatgaggacgaagcaacagcggaaaccccggataaacccgtcagatctcgagacttattcaccatcatgagaatagcacgggaaagacaggcccccatgattcaattacctcctcctgggtccctctcacaacacgtggcaattctgggagataacatttaagtttagatttgggtgggtactcagccaaaccatatcaacacaatttgtagtcttttatccctcacccctcccactctttcccttgaggaaaagaagttattatacaaaaaagatatgtgcgcacgcatgtttatagcagcacaattcacaattgtaaaaacgtggaaccaacccaaatgcctattaatcaacaaatcaattagtgaataacaaaattgtggtgtatatatatctatatatataatacatatacatagacacacacacacacacacacacacacacacatatatagaggatggaatactactcggccgtaaaaaggtctagaaaattttaagttctgtaaaatgcagtagagaataaaacaagatgggaaagcctcaactaattttgtaaaactagtccaacattgttatcaaaataagccaagaacactatgacttaataaagttacaggtcattatcatttaagaccatatatgcaaaaattccatgtcagataaaaataagactaggttacaactagattggaatattttatagaaataaaatattaatgcactttttaaaaattagtaaattaatctgataaacagaatatataaagagccatatggttatcttaataaatatcaaatagttctataaaatccaatatctatcataatttttaaaatataaacattttcaatttagtaataaaaggtaacagtctgaatcttgtgaaaggtatctgtaaaaccaacagtaaatgtcatactgatgaaatattaagaacctttctgttacgatcagataaaaaataaaatgcatgctgtaaccccttctattcaatattcttctacgataattttgtattgttgtagtaatatcgaggaaagaaaatctaaattccatatggataattaaacaaagtgtgatttaggaacacaaagtgagctctaatgaaataaaataatgtgtttagcacaaagtcggaatattggctttcctgggggaaagagaggaaaagagacatgatgatacaaacaggaatcgaaacaggagattttagaaacatggtaacattctgcttcttaaattggatggtgaatgtgctagtatgtattttattgtttcaaactggatatagaagttatctgtacatttgtatgaataatatattccgtaataaaacttttcattaaactaggagacaaaaataagtctaaggttacacaatgtccagttctgggctttcttcatctgaattgtattgcctataaattataatataattccaatcattattctcttgctcatcacaatatttcattcaaagataaaacctttttagataatccatccttcgatatagctaaatgcctgcgcttatgtattatgcagaacccgacattttcagcctgatcataggagttgaactaactcattccaggtcagaattagtgaacattgtgtctatccctataattaccatttttaaaaatctcattagggtaaatttttcagaagttgtgaatactgctcttagaaacaataattttaatttaaattctggtatgtaggatgaaggggagtgaacataaggtgaaagaatatgtaaattgaccccagcactactttaaaattaagtaaatgtctttactaaaatgcaacaaaatcttaaagtatcttaattgtattttttttatattttgctagaaaaatcactgagcattctgttgactagatcagtatttaatttttaaccattttccaaagtcaaacgtctgtcttaaactttaagtactgaagttaacacgatgctaaaacaattttagaaaaaataatttctgcctttaaaaggtacttaagcatgttcttataatactcattatattccaattaatttatactccatgaatctcaaagattgaaattaaaaaacatatgtcgatctatattagtgaagacatactgccctcttttgaacaaagtaaaatttcagggaaaaacggtttttttacaaagcaaaatcagagtgcatagaaaaaataaatgcagagatgatggtaaacaaagaagattaacttgcacattttataaagattttaagaatgctgaatttgattttactttctcaaacttttagtatgtgtgtttgtttactttcatgataattcttaaatgcatttgaacacagtttgcagtttaaagaatatatctatacatatggaaacccttgtcttaaagatatctaatgattgttttaagtaataaaaactctgatattctctgcagattccacctgaagtaatttattaccattttgttattgctattattcacctctatgaatgcttttttacttgacaagtctgtatccgtagtttagcaacgaggccagaacaataaatctgtcactgtgtgatacactctgggtacaagtttatgagattgtctccatgtagatggctacctaaaattattctagaatgtcataactctattaactttttctctaattttgtaatatttggatattctccgttaaaagaataaatgtggaaattttataattttcatgttttttaaagaaatgccaacacttagcatgacaaagggagctaaatcctcattctctattcaatattattgctatagatgttttaatacctgaatttttgagtgaaagtcgatgaacacagaatggatattcctgtaataaacaaatttattgcaatcactagcttaaatagttatagtactcacttaaattgattttaaagatgaatttaattatttccattcactaagccctattctgtgatgtgaaagtatgtttctctggaagagtgaaaaaaacagtttttttctgccctttgatttttgccctccctggtaatggaaagttaaaaaagcatatgcctttttgtggtcaagtgtgaatgactttctaagatagccaacaactaagaagtttcattggtaaataagaatgaaaatgagatttcaatgtacaatgaatcatcactacttctattgaacgatgggcacctttagttcctgaacaggatgatcaagagaatcatcaacgggttgggcatttcagaaagaagatgaagtgtgtgttagtggaggaagctagccaagaaagcaacgatctaatataattaggaagaggctttagaaaagatgggaatggagacagtctgtgctcagaattcaaagacacaaataggagctaaggtacaaattggttatttatcatgccctctagagaagaagcacagactgtacttagtgcatattccctcacactttacctgtatctccaagaaaatcaaaacaaaacgaaacttaaacaatatgatgatgacaacagcaacaacaaactctaatatccgtaatttagggcatgacctacccaacaagataaaaatagttcctcctgacagactaaagcctccaactttacattagacccctcacgaaatgacaatcaaaaagattcctaggtttaactggatattgtggacacgaaggcgagtatttttctgcaattctaaaacccctttttcaattttgactaagtccgcagtataagactctctctttttgaaatccaaacataaacaggaccactagaacctggagaaagctcttcaacagccttcttttctagtcatctctacaaaaaaagaagtttttttttttttctatttatacatatgtgatctggaatccttggaacttaaactcaacttcatgggaaatgtaaaaacatacttttaaattctaactccatctttgaccagattgcaaaggttcatatcccttgctttagggcaagagctgccactgcaaaacctactgatgctcttactgacttagtcctaggctgcccattgacttcatggctccttatgcagtgcatatattattgatacttctaactgagaaaacactacacttttaagacagtagattaatgtcttctcagaatctcttatcctttctcttccacatcactattccctgctataacacccaaaatcctgccacagtgggccttaccggaagggaattctcactattgtcttactcagggaagtttctgtattttactcaaatttattaaagattcccattgagaaccctgacctaatattttttgttgaaggatcatgcctcaaaattgaaactggaagttaaccaaaaggatatgttatcactaataaaagttctcctttgttttacagtactttacattaggtaaaatcagcccagatggcagaaattattgcacatactagggactgtcaactagtcaacagtcatagaccaagcctatatacaaataacagataaccttctcaagcagtacttggctttgttatgttttggaaacaaaggatgttgcttcttttgctggaaactccatcagaaataggcaagttaagaaactttaaaattcatttctacttcttagtgaggaaattattacaaaagttgagaccaatgcaacaaatttctgacacaagtagtagtggacaatctcattgttctctatttcttgatgtctaaccatggtggcttctcaactattaataatatgtcatgctattatttggaggtacagagataaagcatgcaaagtagaataggctacacattttcttttaaaaaaagttacctgactgtctacaactgatttttatcacatttgggacttactatcttggcttgtattgggcaattggggttcttgttccaaattatctttgaggacctattgattattctcatttttgccgtagtggtcatgatgttagctcattgctttacatccagagtcttaaatgcttctctgtagtttccctcttatcagaaaatcaccatcataatacaatagcaaaaagctggagaagatctattgatacagttgattatggagacaactgaatgatctcaagcagtaaagacctggatccctaacctttcatttattggtaaatctcttacaaatgacagtaacgaaaagggaaactgagggactgaatatacaatgggcaattacgaaatactatagggtaattgatctctgactcacaatttctgcagtaaccaacccaggaagtcaaagcatatcctctttagcagtcagcacagaaggactaagaacccgtgacaacaactgctatcttccctatttttatcccacttccaactcagggacaatcatagagagccaattatgctttccaaagtaatcatatatttcaagttagccctcttcagcttctccagccaaaaacctcccatcagagcattcctgaaactttctcctgtgttcattatagagctttccctctcctctccttgcatttgagtctccaccgaaggcaaatgatggcagctgaatcccttgttacatgaagttatgactacatggcttttgtgtttccttatttacgtagacttcatttattgctatatctgcaccgaatagcatctctttctaatctattcttctctaaggatacaattgtttttttttttttaaataagtgtcttattttgacggatcactctcttataattcccttataatactcacacataagagaagtcttcatctatgtcccatttagtattaaggattcacaattcattatttgatcatcggtcacaagaatagtggctggctacattatttctggggcccaagtcccaacactcattaactgtgtgatcttaggtcagtgacaactcatctatctttattttatttacttatatttactcatctatgccttattgtgtaatgggaataatgactctattttcttgattgtcttgagataattaaatggatattcttgagatattaaatgagataattaaatgagaaacagaatttaacatgattctctaatgcacaaaaagcgtataaaatatacctattaaaatgcttataaaaagtagctattttattggctattattatcaagtttaaatatctgacaacagatatccaacattataagaggtttctcttacagctaaaagcattacatttcatcatttcatgaatcaacttacttttactgaaaataatattataacataaactcgtataattcaaatattttccccttgaattaagtacctataggtaatgatcaagatttgaaagtagaaaaacaaagtattagttttctgttgtgctaattatataaaatccccttgaaaaccaaatctaatttacatattgtcattgcatcagtgactttggtttcaatacaacaatggacaacttattttttttaatccaccctgtcctctactttccccacttaactaatctgtagaaaaaaatacatatcataaagtgcattgtaataatacgcatctcacctatcttaccttcagttctgtgtctctgttcattttcattttctgcagtaaccaagtactacttaagaaactttgaaactatgcacaccaaaactctttcaagaaccaattttagtgtttacaatagttaataataaccacagctgtactaaacattcctcttgatcacaatctctttttgtttgtttttgtttttgttttttgtttgtttttttgagacagagtcttgctctgtcacccaggctggagtgcagtggcgcgatcatggctcactgcaagctccccctcccgggttcacgccattctcctgcctcagcctcctgagtagctgggactacaggcgcccgccaccacgcctggctaattttctgtatttttagtagagacagggtttcaccaagttagccaggatggtctcgatctcttgacctcgtgatctgcccgcctcggcctcccaaagtcacaatctctttttttaaataagtagagcaaaagtattattgaaaatcctcactaatttttagaacttaccataatcttcagggatgtttgtacataaattttaaatcacatcgccatcacagtttcttgacaattatcaaatgaaaatataagagaccagagtatttctaccttaataaatgtatttaattgtgaaactggcaactaccgtgtaaagcttgttatttgcttcactgcagagtaaagaagtagttatattaaagaaaaaatagtatacactgaaagcttagtgtattacagaaatatttgatgactgacaccagcaaaatccagggtgactctatctacacaataaaaataggcacttgctttatatgatcatccccaagaatttcggttcttattaagtgatataagagtatgcttctttctgttacctggaatcaatggttatttccaattatcattattagtcttttggataaaactgtatatcataagtgctttctcaaaaaagaatatattttacatatgaatataaaattacacgaaatttaaatttaataagataacataaaagggcagatggggccgggtgccgtggctcatgcctgtaatcccagcacttctggaggccaacgtgggcggatcacctgaggtcaggaattgaagatcagcctggccaacatggtgaaatcctgtctctactaaaaatacaaaaaaaattagccgggcatggtggcgggcgtgcctgtaaacccaactactgaggcaggagagctgcttgaacccaggaagcagaggttgcagtgtcctaagatgatgccattgcactccagcctgggcaacaagtgcgagactctgtttcaaaaaaaaaaaaaaaagaaaagaaaagaaaagaaaaaagacagatggaagtcaggaaattttacatgcagaattttttacctaaaatttaaaaaatgaatgatgccaaggtttatatcaatttgaattatacctatttccactcaaatgtattaaataaaagagaaagataaaaaacttaagcaagagaacacaaactttatattcagaaaggtaaactacagctgtctttgacagttttaactacaaaattttataataaccacattttcaaaagattaggtgtaattttatataatacataatttattagtcacaatttataggctattagaagtttgacatggataagtgtactaaaagcattttgaagttgcgaaaatcaaaatatcatgtccaccttatatttttatcatggtaataagataataggttctttgggtaatggaaagaaatcataagtgtgtaataggttaaaatgagaaaatgtatacgttgtggatgtaagtaggaaagttatctttccagtattatttctattccataatatctcagaaagctttgcccagttatttgaatttctctttcataaaacaataagctggatagttttattggttggttgttgattttgttcttatatgactagtagagaatatactgtactaaaaagttttggagagaggcaagctcagttggaggttgatgttatagtgtagcctctatttccaataattcatacaaatatttataacaattggtgttatagtgcagcctctatttatttctaataattcataaaaatatttataagtattatgttttctttccaagcttgaggaaatactttactatttaattgattaattgaataaaatacaatacataaacttctgttcaaatcatgagttgtatgtttgtttaaatgccaataaaccaaattatcagcccacaataactcactaagtaataaatttattataactaatgaataactgaagtttattataattttaatttaactgatttccatttgaatcatatagatttgtcactttttaatgggtcctgctgttttgaatagaactcactattctcaaaaagataagtttatctgaaaatgtccatatttgaatcatagaaaaatgtaatgctatttttgaagtgtatttaatttatctgttcataagcttcactgagataaattgtgaatggattaaaaaatattccttttacattaatttttgggggattgttgagtgcaattttcaaagtataagtaaggaatttctgcagctgtttagtgtgctttttatgatatcagaaaaattgttcatcgtaataaacaaaccctgtcttcagccctgtgtctgaagtgctcttccccaatcaacactagggattgaacaaaattgagaaaagacaaggaaacaggaaaaggagactgttgctcaactgaagattttagaggtgtgaccttctatagatgaatttagaaacaaattgctatggactgaactgaaaattgttgtcttcccagaatgcatacattgaacccttaatccccagtgtggtaagttttggaggtgggggccgttggaaagtaactggggggtctaactgggatcataggggtggagcccccatgctgggattagtgtttttataagggattgaagagaccagagtgctctctctttgtgccacatgaggaggcaagaagaaagccagctggaccaccagatctgctagtacattgatcttgtacttcccaaccttccaaccttaaagaaataaatgtttgttgtttaaacacccaataaatggtctcttggaagagcacatcctagtgactatgtcacaaacaaatcaaacatgtaaatcaatattttgattaaaaacaaaaacaaaaatatgaacccttataattgtcacaagttccatcatcactaaatacatttaattttttcatcaataaaaagaggattattaaattactttaagactctaagtcataaacaacatttaattcttgataatataaatctagaaagcaatagatttagtctaataatttaactacgttgaaatgctatgaacttggattaaaattgaatttaataatacaatttttaaggtaatctggaaaaaacttccacagtattactttttgtaatttcctaatttttaagtcatattaactctaataaagctagatatagcagtctaatgaatgtaaataaaatataaccctgtaaatacaagatattgttaacacttaaaataacaaatggtaacagtggaatatatagttgcccagattcatcatttaagtcagattttagaaaatttgaatatctcagattcctaaaacaaatcttatacttgggattagcagtagtgattctaacgatccatgctaaatgaaaacattgtattgtaaataaaaccatagaattttagttgggataaaggagctaatatttgcacaaaatattatttcctacattagcaacattgaaagaaaaactggaattatgtttttctagactagcagtattggttaacttttaacagcttaggtcttaatggaatgtcatcaacttcatttagctgttttattttgccgttgttactggagtccactgctcttcctcgatttgttcctgacaatttttttcatgaaaaagaaactaagaaatatgtaagaatatttaagcaaagcacaggatgtatctctttgcacatgaacctaatgctgtagtaatataatttcactaatgtttattttgatatatcaatcatctagagttatctataatgaatacattttaggtttgcaagacggtgatgatgaaccattatgcaacagtgagtatctcactttaaaatttaaagacactacctggacaaatttaaaatgcaaatttcacatcctaggaatttagctcatggttagctttcctgaaataattacttccaaaagtcctgaataacttactgaaatattttttcctaggcaagcattatattctcttttaatttcaaggtattattatttatatattttaaaagctatttaatttaccgaagttgaattactcaccagcaagcttctagaaggtattaaataaacgaacgcatctaaagctcttactgcaatgactagccaataatgaccattcggtatacattagccattattaaaattactcattcacttgtaatttaaaatattctgaagcctgactataatagagccaattttgccttcattttttcctccaccttcctacacgtacttctattgctacattctcaaaatggcatcataattcagagattattttaaactctgagatattcatcacttctaaaattgtcaggtcttttttatctcctctaggttaacagttaatgaagattctcagcagggtgttaaggtagcaattacagcagaagttttgagctgccagagctcagttgaaaagcaaattctatctcaatcaaatccctattgagaaagtgaaagcaaaggaaagtgtagtctctacactggcatggtatctgtaatgaaaagatttaatactgctgctcttataccccggcaacacctattctcaggaaatttcaaataaaagtatccatttttagatttcctacatattctgttcttgggatatgatctactgtacttaacatttgattaagatgagataggtacgattattcttttttgtttttatttttctaatcactacagtaagtatagtagctgtatacaatttgaaaacgactgaaggttataaataaagcagtaaaaacaggttgcatattacatgctataggatgacatacttattccagctaagagcaaagtcgtcataaaatgtatgtttagattttgcttgtatctaaatgtttgataatactcttcgggtcttacagatgaacaagccaacttccatcagttaaatagcttcccaaagatctgagtagcaaaaataccaaggtgcaaattgtactgattctaagactgatttatacaatgtgaaaattatttttcaaatggagaataataatagtagaataaacaataagaataaatgataaaaagggacagccttctacgtagataccctctaaagtagaatttaccgttgccagatgtctcattcgcaggccaaatattggacaagctttagcatatgactcactcactgacttaacaacattttaattacaattcaaattgaagtagtttaatttataataaggtgatgacaaccaggtaacgttttccttaatacaaaatgaaagttataaagactctggaataaactacttgattgtctccagacttgtaactggagcaaagtatacaatgtagttttattgatattttcatttacttttaaagaaattaacacttaaaacttcatttttctcaaatgaaaataaaaggctctcatgatgttgaaagtgtttctgtgctttaaatattaaaatgagaattacttacatcaaattcatatctgaagagactttgaataacacgtctgaaaggttttcataaatgttgtaaaatcatgaatcagagatgaggtgcagcaggggccatttgggcaggcgaaagtactgtaagttaaactttttttttttttttttttgagacggagtctcactctgtcacccaggatgtagtgcagtggtgcaatcctggctccctgcaacctctgcctcctaggttcaagtgattctcctgcctcagcctcctgagtagctgggattgtaggcacctgccaccacgcctgactaatttttgtatttttagtgaagatggggttttgccgtgttggccaggctggccttgaactcctgacctcaggtgatccacccaccttgtcctcccaaagtgctgggattacaggcgtgagccactgcaaccagccaacatttttcatgaatatattaatgaactaaactgtaaagtaaaacttccatggtacacaggttggtttggaactcatccctgctgcttctttttccagatgtttcttcaaaatagttatatcacttgtactttcagttggtcattgaaaactgctacattgtgctgaatacagggaatattcagtgctcatttataaattttcacttagaaagtatcattcatattacattagataaatttctaaatattgagaaaacttggctgttgagatgtaattcttatctatttgtaaaattggattctttcccagtatttatttccttatctacaggcatggtcaacaacaacaaaacacaatcagattttttaaaatgagcaaaggacttaaatagacatttatccaaagaagatacacaaatgatcaatagacacatgaaaagatgttcaatgttgctacttattaaggtaatgcaaatcaaaatcacagtgaaagcaatctggtgattcctcaaaatattcatatgattcagcaattccccttatggttacatactcaaaagaagtgaaagctgggactcaaacaaacatttctatgcacatgtttatagccagattattctcaatgagcaaaaggtcaaaacaattcaatggacaaaaggtagaaacaacccaagtgtccactgaggaatgaatgggtgaacaaaatgtgctacatataatacataaaggtgaaccaaatgtattattacacataaatgctatatattatatatatatgtatatgtacacatatatacatgtatttatatataaatatgtgtgtatgtgtgtgtgtgtgtgtgtatatatatatacacacacacacacacacatacacacacacacacgtatttttttcccaagacggatcttgctgtgttgcccaggctggagtgcaatgacgctatctcagctcactgcaaccttcacctcccgggttcaagtgattctcctgtctcagcctcctaagtacctgggattacaggcatgcaccaccatgcccagctaatttttgtacttttagtagagacggggttttaccatgttggccaggctggtctcgaactcctgacctcaggtgatcctcccatctcggcctcccaaagtgctgggattacaggtgtgagccaccatgcccggccaacatatgtgattcagccttaaaaacgaagacaaattctgacacacgtgataacatggatgaacgttgatgacatgccaagtgaaataaacctgttagaaaaggacaaacagtgcatgattccacttgtgtgaggttccttgaatagtcaaaatcatagaaacagatagaatggtggttgccagaagctgggagaagaaatacgtgggcttagtgtttgatgggtacagagtttcaattggggaaaatgaaaaagttctagaggcggatagcagtaatggttgtacaacgatgtgcctgtacacaatgtcacagaactgtacatttgaacattaaaatgggaaatttaattttatgtatattttaacactgcacatatacagagacatggactctgtatgactttaatttacagtataatttcaccccctccaaaaccacaatatttttggttttattctaataatcagtaaaactattcagcaggcaaatatatttattttttccatgaagaaaactacatagaagtataatatgggaataattgtcctacaaagtcccaaaaagaggccattcgattgtcctctcctgaaaaggatttaaatgagcgttagcatctttataaaccaaagcaattagtatcggtgcggttttgtcctttcctcaatatgtgattaaagctagatttatattctttcagctggccacatttcttagtcaaatgaaatttttcatgtaaatgattctccaacttgaattggacccactcagaaaaaaattcttgtcagaaatgcaaattgaacagcgtcttaaacagaagcactatcttgggaaaaaaaactcagaatgtatattgaaatctaaatggccgcctctttttacagataagctcattcaaatgtcattcaaatgtctttcaaaaactgttgctttatctgtgaaaaaaaatacctgtgctagctggttagcactggagttttcctaatgttttgctctgtcaatatttccttatcaacaaatgaactcatgcgatggtagatgcagaattgaaatactgcagtgattatgcgttaacatctagtatagttttatttttctaattttagcttcagtaaagtaacgacacatctaatttttttaatatttgactcaaaataaaaggatctgagttcaggaattattgtccaaaaaaaaagattgtcctaaaactaacatgacataatgggaacagcagtggccaggaagtagagacctatagattctttttgccataaatgagctttgtggtcttgagactggcaccctaatatctcacgacggcagtgaaacttgttaaataagaagaaattgaatggaagagtgtaaatttaatagcaaggttttctggttttggcacttattataacaccttttaaatataagaacttggaggaagaatcttaaagtctctcagccattttatataattaggcaaagatacacagttgaaatagacaaatctgacccatttttttcacaggtcaagacgttatacactatttctacatcaaatgttctagacagaacacccgttaggaacaagcagggagaaactatttctaggcattttaaaggtcctggtttaatctgtggaataagataaaggccctagttgcgcagtccaggagatggccctagccttgccagggaaaccttgcaggtcagcactaacattccctgagatgtaatcagggctgggaataagaaatcgccctagtgccttacccagttaaatattacctgaagcccaaggttggagttactgttacaataaacaagcaaagaaatagataaagccggagaaagcgaaagaaaacaagtttaaagggatgcgatgatattttttcctcagagagtttattcccataaaacctacatttccaggtatgacaaagtaaattaaacagtgaaaaaaataaaaaaaaaggtctttctctaaaactttgtggcaaagctataaaacaactttaggcttaagatttcttgcagctaaacctgatgagagagagacatcggtcaaggtgaacacacttgttctgtctccactgggaatctgagtgagatagtcaactcatcaggataaaaatcagcaaccagcaataggatgagatgattttataaaaagcttagttcgttaaggaaagcaaacacatttcttgctgttattttcttcttgttttaaattattatactttaagttctggggtacgtgtgcagaacgtgcaggtttgttacataggtatacgcgtgccatggtaatttgctgcaaccatcaacccgccacctacattacgtatttctcctagtgctatccctccccttgcccccaacccccagacaggccccagtgtgtgatgttcccctccctgtgcccatatgttctcattgttcaactcccacttatgagtgagaacacgcggtgtttggttttctgttcctatatcagtttgctgaaaatgatggtttccagcttcgactatgtccctgcaaaggacatgaactcattcttttctatggctgcatagtattccatggtatatatgtgccacattttctttatccagtctatcattgatgggcctttgggtttgctcccagtctttgctattgtaaatagtgctgcaataaacatatgtgtgcatgtgtctttatagtagaatgatttataatcctttgggtatatacctagtaatgggattgcttggtcaaatggtatttctggttctggatcttgaggaatcaccacactgtcttccacaatggttgaactagtttacagtcccaccaacagtgtaaaagtgtgcctatttctccacatcctctccagcgtctgttgtttcctgactttttgatgattgccattctaactggcgtgagatgttatgtcattttggttttgatttgcatttctcaaatgaccaatgatgatgagcttttttcatgtttgttggccacataaatgtcttcttttgaaaaatgtctgcttagatccttcacctaatttttgatggggttgtttgtttttttcttgtaaatttgtttaagttccttgtagattctggatgttagtcctttgtcagatggatacattgcaaaaattttctcccattctgtaagtggcctggtcactctgatgctagtttcttttgctgtgcagaagctctttacttcaattagatcccatttgtcagttttggcttttgttgccattgcttttggtgttttagtcatgaagtctttgcccatgcctatgtcctgaatggtattgcctaggttttcttctagggtttttatggttttaggtctcacgtttaagtctttaatccatcttcagttaatctttgtataaggtgcaaggaagggatccagtttcagttttctgtatatggctaacccgttttcccaatagtatttattaaatagggaatcctatccccattgcttgtgcaaaattaccagccagcatcataatgacaggatcaaattcatacataacactattaaccttaaatgcctcagttaaaatatacagactgacaaattggataaagagtcaagacccattggtgtgctgaattcaggagacccatctcacgtgcaaagacacatggagaaatatttaccaagcaaatggagagcaaaaacataacaaaaaaagagagcagttgcaatcctagtctttgataaaacaggctttaaaccaacaaagatcaaaagagacaaggaagaccattacataatggtaaagggatcaatgcaagaagaagagctaactatcctaaatatagatgcacccattacaggagcacccagattcatcaagcaagttcttagaaacctacaaagagagttagactcccacacaataatagtgggagactttgatacccactgtcaatattagatcaatttgctgttattgtctatctttgctaccactgggcaattttctttttttcagaaatagaaattagaaagcagtaactctttccacagagattatgctcagttctaggtcatgtgtcttttgacccttttgcctaacataagaagtctgttttaatgcactggagatcaagttttcacaaaacaacattgtgatttcacaaatgctttactagaaagctaaaaatgaagcagtgtgatggtattttattttagatcaattcatgcaagcataaccttacatggtagactaaagcttcatgaagtctagtttgatttctataacctggatatttagagctgctgatttatgaagactagttagaaacctgaattttagttattttcccctcaggcattttgtgatgtacttgtttcatgcagttgacgttccttgctttgagaagcacagaaataaataccaatcagtcaaacagataaccctggaaaaatgatatagatatttctcacacagagaacagtggcaattgggtttctgcccattactgtgtcacaggttttctgaaatgacttcctatgctgctctcccaccaatgacatttataatggtctctattctttctgaaggaagacgcctggaggatgtgagtcctttgattcgaagaagctcacagtactctgtaagattctaattataaatacaaaacattaaaatgttttgcccattattttccactattttcactcctgtttattgaaaactaatgagataatgcgttttcaaagcacacttaaattattgaactttaaaatacagtaaccaaattatcatactcctaaagcaattttcaatctttttaaagtataaaatagtacctgaaaagagcataacacttttttaaatttaatttttatttataattagcacacggtattgtacatattcatagggtacaatatgatggttcaatgcatgtatagatagtgtaatggaatccagccattctattactgggtatatccaaaggaaatgaaattggtaggtctagcagacatctgcacacccatgtttattgcagcacaattcacaataacccatatattgtataaacctaaatgcccatctaatgatgaatggattaagaaaatgtcatacatatacacaatgaaatacgattcatctacaaaatagattgaaatcctgtcatttgcagcaacatgggtaaatctggaggacacgaaataagccaggcacaaaaagacaaacactgtatcatctcactcatatgttgaatataacctgttacttcttaggcaataaataaatggagattttttttttttacttacagctttgatagagcatcaatgttgagccattgaaaaatctgatggagcagaaagtttaatactaaatctaacctctggcagatatttaggacaaaacacccagggttctcgagctactttggtctcatagtggaattatagagattattctacgttcttgaaaaagggatttcagatgtcatttttcctttctttgtctgacatagaaagttataagccaggtatggtggctcatgcctgtaatcccagcactttgggaggcagaggtcggcggatcacgaggtcaagagattgaggctatcctggccaacacggtgaaactccgtctccactaaaaatacaaaaattagctgggcgtggtggctagtgcctgtagtcccagctactcaggaggctgagacaggagaatctcttgaacctgggaggcagaggttgtagtgagctgaggtcaggccattgcactccgacctggtgacagagagagactccatctaaaaaaaagaaaggaagaaagaaagaaagaaaattatataggtggctaaactgtctcatcctgctcaacttattgattaaatcctcctcatcctgattttatacttcagctgtcagtcaagttgggaatcacatggttattctttcactctaccatgctcatgatgactatgtgattactgggtcattttgtcagggaaattacaatcagtaagggacaaggattcatcttaaataaactcttacattattatttcagatattggtaataagcattttaaatctggtcattttgtgtttgtgtgtgtaccatcccctaatataatagatttctattctaattatatagttaggtataattttgacagtgttcaccataaaaatatatttttaggtatttttaactaaaatatttatatgaatactgttacagctggaggaatcagggataaatcacttaaattctacaagaaatatataggcttaaagaatagaaagtggggataatgaagactacttcgtggctccttccaactccaaacaaatatttataaatacattatcataatatattataaacatcatatatgacattataaataaaatgcacattaaataaacatatatatacagtatacaatacataataaaacacaaaattatgtgtgtcatatatatttataattcttgataggactgtgaattttgaggagctaaattagtgagttgaggattgtaggctatgaaaggacccactctacgcagaataacaaaacatacatttgagaggccttgaaaatgtttaatttttatggaatgatattatagtggattgctcagactcagaaactgatgtgatgggaacttgcccaattatatctaaaaaggataaagaaaattaaaggacaagtgtaagacctctagaagagatattttatagtcttcttatggcagaagtggtattaaatgccaaagaatgactgatcttttgaaacttttgtcattttttacaattatcacttttaaataaaaattttataacaaaacattttgaacttgactttgaggaagacaaagtttgtcaaaaggccatatattttgcaatttattttcaatccatgacataaaaacataaaacaactactgtgatattaagtaaatttaaggagaatcttggtgattgtaggtgaatatgattcaaaatatttaagccacatgtcttcaaaagattataaaataaaagatttaataaattaataaagtattaagtaaatcaaattcaaacaagaacatgatttcagtttttttctgtaataagacaaattagaattgattagtgtattttgttggatgtttatttagcaggtatcagagtattggaggagaactaatatcacccagtccccaaataaatatttttctatactaagtgtgagattagcttatctctctgttactaatggaatagataactagaggttcctatttcatcaagcatgtgtaagaaagagaaatcagaaaaataaattctccaatgtttttattactgaagtaaaacaagtttatatttaacaacagcataatcacagcagaaactatgccaaatgcattttactttggacacattgtaattttctatatcctcactggatgaaatcatactcatcgttgcttttttgaaaccccatatgttgaacttgcatatgatgattcaatattgaacacacatttcttcataatatataaatatgatttcaatattttgaagaaaacacatttttttattatttgcatttgtccaatgagctggatacttggcatttgacaaatgtgaaaactctattaagaaaaggtagtaagcgtgtgtgccaacaacacacaaaattatttatttagaactgaatatatgttagtcactgtaccaaatactttatggtttctcattaatcttcaggcaattacatggtgtactgcaaaacccattctgctcaactagcactaacaaacttgaattcagattaactatgagactaagcacatcaacacaataggcttatcccaccaccatatttgcttagactcatgagagatataggtcagtcaagaacacagcagagtaagagctcaggatttacgaatccagtttcagattccccagtcactcctaatttgggatctgtgtgatcaccagaaaattgtgcacgtgtaccctaaaacttaaagtataataataaaaaaaaaagtagccagaatgggcatgggtgaaatagagtagtcatcctttctaagactttgctgctttcaaaaatacctaatcacttagttctcccactggtaccaggccagttcttattttctagggcaggtgcagctcaacaatagaatcttgcaatgaagtgctggtatttgatcctaaacatagtagcataagctggattcttatttattttgggtcagatatgatgatgttcttatagaatacattctgtaaataaaaatataataatatgcaatgcagatgttacagaaatattaaagcagtgtttagcttaccaaatatcagtaaatatcattttgtcaaccatgacaagaaaaacagccttttccaggtaccctaaaggaagatagcaagtatatattgcagtccttccaatgcaaaaggaaattaagtttcttcctccaaacataggaatgggaatagaaagcatgaatcaagttgttttaatcacctcgtattggaactgttgcggagtggggctcctaccctggggttttggtgagagcagaacacatgaccacataactctggacaggtaggttgacagcagtttattaggcactaataactcacagccttctggaggaggatgccacatgcatgcagggccacagaggacttgtgcccaggaatagaataacaaccaggggttgtgagaggcaggctttgtagaatcaagagactgagatttcctctggtttctgcaggagaatgtgaagagcttgctttagtgacactgtgggctgacagggagccaaaaactgctacttggcaataagctggaactgtgcctgattgccctggtgaggagagtcgtttggctagaagaccttatccatggaagcagagtggagagggaaacttgtggttaagctatcctaggcccttccaattttaccagatgtcaacacagcacatgtattgagctttccttttaggccatacgtcacacaagtttatgatggcacatctgtcccataatcccactggacatcatgaacagctctcaccataagtggcacaacagaggctattggtggaaccagattattcaagtcataataatcaagttagcatccaggatccatctgcttttctcgtaagcgaagcatggttgctggcaattaattttcctcattgaatcattagttttattaataatgtttgatatttgtaatggaagagattttggggtattctatagctttctattacacatgatcaattaaaattggcaaaagacataagtattcactgtctaaccataggtcagctatagcaaaatcctctattctgatatctatttcaattatgaatctatgtacagatatttttctgattttctaaattttcctttcatcgtagctattactttctaccacacaattaccacaccttgcattttgactttcagccctctattagtacttcatgtccttctacagacattgcaggtcatcatgccccagtttctgattctcccatcaggctgtattaccttccttataccattcagttgcattcgttttagaagctttggctcctctgctgaaaatcagcaattatattctccaacttctgcttaaaatatatatatatttatatattttaattgtcaaataaaaattgtgtgtctttatggtatacagcatgatgttttgatatatgtatacattgtggaatggttaaatccaacttctatttttaacatgatctccagaaattttcaacagaactttccctacaactaaccaagaataatttatttaatatccttgcatcacaattttgtccgaactgctctctccaagctttctcttatgcaaaattgcctttgacatattggtatgaggatgtggcggtcactcctgcttctaacacccctgtgcaataggctcttcactctacaagcatcagtggtctttagttaaaactgacaaactaaacaaaacatgcttcatctagtatcaatttttttatttatttatcttatgaaagcatgtagactaggaagaaaaatgcgctatccataacaacagtgtattgtaatttctgtaattttcaaacaaagtttccaaatgttcccaaattactaaggttgggacacacatcatcaagagggaaactgagtgggctcccagagatcaacacagagaactcaagagacattttggtttttgaacctcactagttatgaagtctttcaggaatactgactatctcctattttctgatgcagatgtatattattaatatgagtgatatatcatctgattaatacaatttgcaacaatgagcacatgtttatggtaacctagaccagattcttacttatcttagatcccttaattaagagttgaaagaaatgtgttatcaaggacctaatttttaggcatcgctaagaagaaacataaaagtatcagaaatatttgttagtcacttccctcctataatttgtttggcagtttttaatcttatttttgttgcttaagaatttcctaaaataaaattaaatatacatatatgttttccctgaataattctgtctgaaactcaataaaatctttcaatctgctattcaaatctattattcacccaaaaaccaatcagaaaacacatctggtacttttttgtactcattgcctcttcccatctgacttattttctttcttgatctttcaatactcacatattagatctataataccacttgttttccaattatttcctctacaccattgcctctttttgtatttttacttcaaattatttcttttgtttggttttcatctctttattcagatctcaacactggccatttccttagttcatctacaaaaatctccttccatgatttatttatttatttatttatttttagagctggagccttgctctgttgcccaggctggggtataatagtgtgatctcggctcactgcaacctccacttctggggttcaagcaattctcccgcctcagcttcccaagtagctaggactgcaggcgcacaccaccacatctggctaatttttgtacttttagtagagatggggttttaaccatgttggccaggctggtctcaagctcctgacctcgtgatccacccacctcagcctcccaaagtgctgggagtacagctgtgagccactgcacctggccttcctttcatgatttattaacctacccttgatgaaattgatctgttacttcaaggaaagctcaaatagtcagcatctgcctgtaattgtgagagacctaattctgaagtctgtaattcaggatctttccagagcctcccgtagagcttgttgctacatctccccaggttcccctctggcccagagaagatagtttctgcactgatcttctttttcaaagcttttccttatcactaaactcaatgaaacagtcatctggcttcagagacttcctctgtttcatgcagaaaagtgattattaagtgatgtgtgccttaaagagaattttatatctctccttttatttacaaagtataagaacagtgatagatgttgtttgttattgttgcctttttgtaatttacatccttgggccttttattttctctccttaaacatcatgtatttacatcaagtaaaaccaggcaccaaccttgagacagtattgtaacataatatttaatatttaatttagggaatatgaaaagaatctccaccaaaatctcagtcactagttgacctaatggacacaattatcttaagaagctaacttgatcaattatttaaccatagcactctttttatagatagctgaggtatggcattttaataattaatcaggaaggatacatataatttaatatctattttggaaaaagctttcatatgggtctaaagatcattaagcaataaaatttaagttgagttggtacaacataaatacatatacatgcttcaaagaagatgggtgaatttttacagtacagtgaaaagaggaactggattaaggaatagttaatatgtttttctgctaaagaaagttatttggttcctatacccagaataccccatatctttatctttcatgaaggcatttcatctcttactgacaaatcccaaagcaacatgttacgttcccatcaaattaaagcgaagaccagagcttcattgactcaagagagaatctgtacctgatcaatgaactgtcatttgtatcttctagagcatattaaaagaaaataaggattccaacgtgtgacatttcatagatttgtgctttttgttataatgtatgtagattttatgagttgtatgtacattgtttaacatatgctttggaacattgcattaattctgaaatttaaaatcagaagacatggcaatggataaaacatttatatgcctttatatcatgaagatacagttccagctttgtaatttgggtgacaaatgagtaataactttttaagtcagtaaaaatatttcatctctttagtcggtgtctgtgaaatagagtgatagagagagagagagagatacagagagaaagagagagagagagacaggggcagggagagagagggagtgagtcatgtgttgctatataagctatataacttactgtttcatatataccagctgggtttctcataactaccagtagcttccatggaaatttcttttataggttagtgatatcagaccactgcagtataacagttttcactcccaaattattacatgacacactagaattttcactggtagatgttataatttaagtcagtattgattgttctatccttttaaagatcagtttctttttcaatttttattacaggttcaggcaggacatgtgcaaatttgttacaaaagtatattgtgtgatgctgaggtttaaaggacaaatgaatctatctcctaggtagtgagcataggtaattttttagttctttcttctctcattctctccccactcttgtattccccagtgtctattgttctcatctttatgtccatgtatactcagtgtttagctctcacttataaatgagaacatacagtatttgcttttctgtttctgcattagtttatttaggataacagaatcaagctgctgcaaaagctgattatattcttttttatggccgcatagtattccacgatatatgaactactttttctttatccagtccagagttgatgggcacctgggttgattccatgtctttgctattgtgaatagtgctgtgatgaatctacagatgcatgtgtcttgttggtagaacaactaattttcctttagggatatactcagtaatggaattgctggatggaatggtagttcgactctttgttctatgagaagtctccaaagtgctctgcacaatagttggactaatttacatttcttctgacagtgtatgtgttctcctttctctgtagcctcaccagcatctgttgtttttaaactttttaacaaaggccattatgactgttgtgagatggtatctcattgtggttttgatttgcatttctctaatgattagtaataatcatcttttttatgtttattggcagcttgcatgtcttcttttcagaagtgtctgttcatgttctctgctcactttttaatggagctgttttttgcttgttaagttccaaaaaaactgaggaagagagaccccgccttaattcattctataaagctagcatcattgtgataccaaaacctggcagggaggcaatgaaaaagaaaaacttcaagccaatatctctgaacacagatacaaaaattcttaacaaaatattagcaaactgaatctagcagcacatcaaaagttaattccccacaatcaagtaggctttatccctgggatgcaaggttggtttccacatatacaaaccaataaatgtaattcaccacataagcataattaaaaacaaaaaaatgatcatctcaatagatgcagaaaaagcttttgataaaactgaatattctgttatattaaaaacttcaacaaactaggcatcaaaggaacatacctcaaaataataaaatctatttatgacagactcacagccaacatcatactcaatgggcaaaagctggaagcattcgtcttgagaactggaacaaaacaaggctgcctaccatcaccaatcctattcggtgtagtactggaagtcctagccagagcaattgggcaagacaaagaaagaaaaggcgtccagataagaaaagaaatagtcaaactatgtgtcttcactgacaatattattctataactagacaaccctaaagattctacccaaatgttcctagactgataagcaactttagtaaagttttaggatacaaaatcaatgtacaaaatcagtagcatttctatataccagtaacgttcaagttgagagccaaatcaagaacgcagttccatttacagtagccaaaaaagaataaaatacttaggaatctagctaaccaaggaactgaaagatttcttcagagagaaatacaaaacagtgctaaaaggaatgagagatgatacaagcaaaagggaagacattccatgcttggggataggaagaatcaaaattgttaaaatggccatactgaccaaagcaattacagattcagtgctatttctagcaaactaccaacaaactttccacagatttagaaaaactattctaaaattcatatgaaacctaaaaagattcccaatagcccaaagagtcttcagcaaaaagaacaaagccggaggcgtcacactgtctttcttcaaactatactgcaaggctgctgtaaccaaaagagcatgatacaggtaaaaaatagacacatagaccaatggaacagaacagagaacacagaaataaggccactcacctacaaccatttgatcttcgacaagtcaacaaaataagcagtagaaaaaggactctctagtcaacaaatggtgctgggataactggctagctgtatgtgaaagaatgaaactggaccattacctatcattatatatgaaaattaactcaggataaattagtcacttaaatggtagaactcaaactataaaaatcctagaagaaaacctaagaaataccctccctgatatcagccttggcaaataatttatggctaagtcatcaaaagcaagtgcaacaaaaacaaaaattgacaaacagaacctaattaaactagaggacttttgtctagcaagagaaactatcaacagagtaaacagataacctacagaaaggaagaaaatattctcaaactacacctccaataaatgcttaattttaaggaaggaaacatcctaatatacatatcttagttttcaaatttctattttatttaaatatgttgtattagctctgcaataaaattacaaatagtatttcatcctctattttatctgaaatctcacatttacaaccaacctcaaaggccctgttaaaatgtatccttttaatttattttcttttattcccattggatctgctgtgaaacactatgcctaaaactatttgggaagggaaaaatgcaagtaacaactaacaaatatatagaatctttatttttgtggttaggaaattttattgccaacttaatgttcatgattcttgttttattgtctgttaacacacagaaagagtctttaaaatgagaatttctattttcattgaaaatcagtattaactgtactttgtaccatatcgtggcagtctgtattcaacttacgaatgctctgcctcctgagtgtgagagataacaggaatcctactgagctcattatactactggccagagtgatttgcttatggccaaagcagatagataaagatatgcaatgcaaagaattgtcagaaagtcacacaattaaatagactattgtcataatgttatatattaccaatgatttttgttataaatgtaataattacttattaaaactatactgatatacctgtacacatatttttaagtaatgaaagctttactctccccaccacacagacttaagaaagaattactgttaaaagtttgttgaatatttgtacaaactttatttaactagtcaccaagagaactagagacatagacatagaatgactaggtagttttaagacatatacacagcacacatttagggtatgaataaatcaacacttcggcccataacatggaccaattggggacaattttaggccattgttgcaaacacacacaaaaatgaatcccagataaattaacaattctaaagcagtaaccataataatacaataaaaagtcaatagcagctaacgtttgttttcttctagatagtattttattgtatatgtattaactcatttaatacaaacccactatgttttaagtgcgattatcttggtgccatatttagttgagaaaactaggacatgttaagtaactcgtccaagttcatacagcttatagagggtgaaagctgatttaagaatgatgacaccatagaaaatttggttcccccagtttttggcccaaggaagagcttctgtgatgtcttgcatttccctttttgcaacattcacaacacttacagatattttactatatcaggtcagcacctgttgtacagatggtccaaactctgacactcagaacaatttctaacttatttttgatccctaatagtgagtgactgattttcttagtcccccccaaaattggctttctaaattgccaatcgaaatttcagcagtatctgttgggctgtttatgattattcttattttttactttaaataatgtcttctttttctctcattttttttcatagcaatatgatttttcttcacatatgaatcaggcttaggaatcttactaataaaatatttacttcatgttaaaactactttcctttcttaaaatcattattgttcattttgatccttttggctctaataacttaaaagtgttcccatcacatttttcggtatgtgagcaaatgttaaatgacatagtggggtcggtatttgcagcctgtggactacacctgtgtattgtgaagtccactgaatggacttctggaagattccaaatcctgcctcaccatcccttagcataaacttagtgaggtggggagctctggtgatccgagggaagtcttcatcctttaaggagccggcagttgggaatggagatcatgtcgacttcttttgcttccataacaaagctaaaagatttggggcatgagggtgcatccaatgtggcatgtattgccaacttcataaatgctgattatttcccaacagcatcccaagagttgatgttccagtcatgtcatctggggagagaactctgatgaaattccggaagtccgttgtgctgtgcgttctcttgtccctaattcatctcttcatcagcctctgccagtgagatctctggataactgtgccttagagctacggttgcctgtgggaaacagaaaagggttatcattaaaggagcatctgttagaggggtgttcttgttctgtttttgttttctcagcttctctatttggtgtccattcatcacaaggcaaattatattaactatgtgttcttattttctgtattctttatgatctggcatttgggaacatcagacccactatagacgcagggagagactgccccttccagggttagctaattgttaaatacagcaacttgtgtaaaagcatgcctttcatatgcaagccaaccactctctttatctcaccctcacacaccaagccaatattcttctgctctaaatcatcccaagcctaggtatcagacaactagggacagcctctatcccccgaagcccaccagaattactgaatctaaccaatcctaacccatgcaccttgtcctgtcctgccttttccacaggaatcccaatacagactccgactaaggcttcccttttactcttatcttctgtctctggaccatcttgtgtccctgtgaggtctgacatgtacccttcgtttgtgaaatgtaagcaataagttcttctcttaatggaattcgcctcttcatgttgtcactcagtcatacttctataaattaaaacctgggtataattttagaacggttatatcttgtggcttcctcaaaacactctgggggatatatttgtttgtttctagcaacataatacagtccttggcattctcttaatttggaatattcaacattgtgttgtggttaatattgcatcacattttcctgatatgattggggctggactggcttttcctaaaacttgttatctaataaagactgctgttttggaggagagtttatatacactaagtttgtaactaattcaaatacaatatgtctgatgtcaaattttgtgcagaaaactacttccttagggtgtccctgcctgtctccagggttgcagcatatgtgagttccacatctggacattcttatactgtcttcttggaaggaaacccagcctcccagccacttctctcttaactgatctctctcacttctcccaataagttagtctgggcttatcacctcaatagccatccctgatgtggagagcctgggcagcaactgcaaatataacaattaccagacctgacagcagttagcacgataaagtacaagtagagactggtactaaactgatgaaggagaagcaagatcaggaggagacttgtatgggcctgtggttctccaggaaatatagctggatttagttagtttcaggatgaaaggaaactggtagtcaaggtgaggaaaaaatttaggctaagattagaaatttgagcaaatcggtgtttaagttaatatttttaaatgagtctcataactttgagttccctaatccctaggatcgcaaaaattttttgaaagcattaaatagaatggcttgggctgggcacgggggctcactgctctttgggagctcacagcactttgggaggccaaagtgggtggatctcttgagtccaggagttctagaccagcctgggtagcatgttgaaaccatgtctctaaaaaaaataccaaaagtagctgagtgtggtggcctgtgcttatagtcccagctaccaggaaaactgaggtgggaggatcacctgagcctggggttgtagagattacagtgaccactgatggtgccactgcactcctgcctgggtaagagactgagaccctgtcaaaaaaaaaaaaaaaaaaagaaagaaagaaagaaaaaaaagagagagagagaaagagagagagagagagacagaatagcttggactgtatttttaaatgttaagaaagcacattttccctgttttattgtctctgaaatttatcatcattgaagtgcctactgagactgctaaatgcatatttgattgagcagcattgaatttaaaaatcaggaaaaatctcccttcactaaggaatattttgttgtctgagcaaagtccattttggtgtatcattctaatttattttttaccaagtttatttttgtttccttttggtgttaattatgcttctgatccatcccttttatttacatttatatttaaaatcaatgttgtatatcattttaaattgcatgttttacaacatctggtttaattacgctttctctcttattgccatctttgctgcagctgtttctctcattcactgcttgctaccagaagtttattttgccttatttctcaatttcattttcatgatgtatgcaacatttttttttcacattagagaaactatttttttctgtatttcatttttataataacaaattaatcatgccacaagaaacacagtgttgacacagacccacagggagaaaccaacggtgtgtgaactccacacagagaatagctttgcatgctcggttgcagagcatgaatttggctgagtttcttgcttgcatgacatctccagaggcaggactcagggagcagaaggtttaaaactgtgagcacaagagatagtgaaaatctttctcatctaacacttcccagaatccctaaaggagacccataataacagtgagtaatacttttgaaacagatagacatagaagtttccatctttagaggaataaatttttattttgctgagttggcaatctaatgcttaagaagaagcaaagaagtcaaggagcaggatattatctattccagctccaataagatatagtgtttaaatcttaatacaaagttcagttttaaacctatgaaaactaatatgattttgagatatacatagatcacatgagctaccgctacactgatacatctaaaattaaaatgtcattaattaaataagacactgagcaatacttccatatttttaactgtatgtgagaaacctatacaatagaagaacattcataaaattgaagcaattgattctcaatgtcattagaacagtttaaaagcagtttcatatatattaaaccaccagatatccataacactaaataattactaacatacccactaagtaaatgagaaagctgaaattcacaaaatataatagacctgcttcagttacaaatatattaaagaacagaagtgggactggaatttgagtcttttaacttcaattttaggtttcttttctcctatatacgtgtataaaaacaaacaaacaaaaaacaggctgggcgcagtgactcatgcctgtaatcccagcactttgggaggccaaggcatgtggatcacttgaggtcaggagttcgagaccagcctgaccaacggggtgaaatcccttctctactaaaaacacaaaaattagctgggcacagtgacacatgcctgtaatcccaggtactggggaggccaaggcggtagaattacttgaacctgggaggtggaggccgcagtgcaccgagatcgcgccattgcactccagcctgggtgaagaagtgagactctgtctcaaaacaaacaaacaaacaaacaacaaatttcaccagtctaaggttcagaagattgaagttctaacttcattcacactctgcattcacatcgtcattcacaagatgcttcaaaaatggaatgttattttgcctctttgcaatgtagatccagagatttggatgtaaagtaaggaatctagggttgcaaatatctcaacttctctctctctctctgtctctctctatatatatcacacacggtattgagttaggcattaacataaataagttcttccagtgttttctttttaacagtaatagaaaataatctaacaatattaatatgttgcaaaaaactccacagggccatgaggaccatatacttttaatatttgtggcaagacaacaaatattataattctgtgataatcaaaacttcagaaatacatttcactttacctgccatatagatgaatagattaaaccatttattttatttcagaaaatggtaatttcaagaagagggaaatatttaagtggagataatgaaatgttcaaactgaaatgatattttattcacttattttataccaacccagtaagagttcaacctttaataacagctattgtaggaacagagttctcaaatgcattttcagttgggattattttggttaaagtaatttttttatattcgacactttgttttgttgccatggctttgtgctgctagagttttaacatggatttcaatatgagaacaaagcctagagaaatatggttttaattgtcagcttatagataaaaaggatgttgaagaaaaataaaactactctcctactatatatatgtatatgtagtatatatgtgtttatatatatgtgtgtgtgtgtgtgtgtgtgtgtgtgtgtatttggatagttagcgtattagaaacaatgcatctatttatttttacaagtgtagaaatccagttagaacagcaaatcatttcactttagacagtttgaaatccattttatcatttatatagaaccatattttgaggtttatgtttatgaattctgaagataaataattcctcttataaaagtaagaaggggagtaaaagaaatttatcataacacaatattcaaatagaactagaaaaatcttacttgaatacctacagtaattgttagggtaattccttcccaaaagagctattaatcaaatacacaatgacaaaattagtattgctttaaaattccttggaaaatattaaaataagttttttatatcataaccagatggcaaaatgtaaaaagaagtccgatttttttaactgagtacaatttcactgaactaaatctatatttcatttttatatgaattactgggatgatgaacattttaacatttttaggtatgaaagtactgagaaatcttggtaataaattccattaaaaatttagggcaagtttaaaggtacaatttataaaaacatcatattcgatattatgattttgtggctgtagagtagaaatgtgccaaatgtttataaataaaaatcagatcattttacattcttttaatatttgacatggggttattaaagggttccatagtttttagttcccctggttgcaagtagtcaaatgctcttgaattagagcagtttttattaaaaacaaaaattatcatattgatggcctattttcttttttgtttcattttatttatactaaaaaaaattccggtaggtagtgaaccgtaggtctgttatatagtctcctaggacattaacattgactaggtgataatattcatgttgatgtttctgaaataaaagcaatatgatggagtgaaatttactaaacagagacaaatgtgttaaaaactgccagtgtcataaatatgttttagggtttatcatttgcagtcttacctcttttttttcacacaatttctctgttattatttttaactcttcacccttatgcaaacatattgtttacaaattatgttctaaacacaggagataatgaagttattttgtttttgtgtgatttttaggggcagtaagtagaactaatgcaggagagacttcaggtaggcctaaactctgaacctggtaggaatatacaatattcaagaaattgtctttgggagacagaccttcagcttagccattttagcagagataatacctaaaagccaagtgctttcatccaagctgttataacaaaataccttctcctgggtagtttataaacaacaggaatctatttctcaccattccggggactcaaaagtctaagagcaaggtgtaggtacatttggtgcctggcaaagaccccccttcttgctgcatctttacgtggtggaaagcaaacaaattccactgggtctctattacaagggcactaatctcattcatgaggactctgccttcatgacctaatcacttcccagaggcctcacctcttaatactatcacattggggattaggtttcaacataattgtttaaggggcatgcaaacattcagaccattgcaagcagcatatggaatgcggcacctgcactgcgttagatgtaggtgttttggactctgatctctgattaaagcctccacaactactttcgtataattcccattagaaaatgatcttggccttctggttgtgatggtagctcagaaaagttccagaaagtattattagtcatgaatcattcaacaacctcaggaaaggtccattaatgaatctgaattgactaggactaaaatctttatcccctttaccttgagctgattggaagaataagaaactatttttaataattaattgcttttgagatacaggacaggcttattacaatgacactgatggtccctcataggacaggcttagaatttcatcagtaagtatgctgttaaaaacacacatgctgaattatttttccagaccagtagcgtgtgcataataggctgcataggaaatgggtctccctaactaactgcagtctctggagctaagattgtgtaggagttgtggatggggttggcccatgattgaaaaaactgagcaagggaacccccaaagccttcattgtgatgagggtcacctcttgaaatagaataaaataagagtatagcaatagatcaaaagccagatgatagcaaatcaaaagttggagagctgttgaggattacagcattcacctgctgggagtgagggaaaagacaaaatgaacacgttgctaaaattctagcttactaaacttaataaaagggaatgtcttgaaccaaaataacatgataagaagtgctctttaagagatgttgatgaggatgagcttactttctgagcatataaaatagaacattttcctctaagtcagtcaggataccatagttaaacacatgctgcattcacattgagaatgttgcggagaatttaatattcagactatttacaatgtgtcggaatgtttagagaagccacagagaatagtgcagtatttggaggaacggaagatgggttagggcaatattcagaaaacagaaataaagattgtcttatttttttttttgcctggcctgaagttaattgtcagtactaagtactaggaggaagaagagacacaaaaagattcaaaagtggtatgtgtatgcatgcatgtgtgtatgtgcgtgtgtgcatgtgtgtgtgtgttccctatgtcctggggcagaatttaaaatattatgcctttgctatgatttaaatgtttttcacctccaaaacttatgctgaaatttaattgccattgttacagtattaagaggaaggacctttaagaggtgattaggccatgcatgaggcaccctcatgaatgggttaatgcagttatcatgggactggattcattataaaagcaaaagcttggaccaccttttttccttccctcattctatcttgctcttcctccacatgaggacacagcaataaggtatcatctgggaagcagaaaacatccctcaccaggcaccgaacctgttgacaccttggttttggacttccaagcctctagaatcatgaaaaagaaatttgtattatttttaaattacccagactcaagtattctgttatagcagcaaaaatagattaagacaaccctcttccaaaaaaaaaagcgtcttagaaattagctgctccagaccttttttacatataattcttatagaaacacttcatataaattacaattcttaatatgtttacttaggtctgttctcaatagctgattttattttattttttgctcttatctcatatgtaaattttaactcctaaaggaagcatacaaaatatacttgtttgtgtgtctgtgtgtgtgtctgtgtttgtgtgtgtgtttgggggaatacaaagttttgaagttctagatttttaacttacagtataaagtgtatggcttactcctcagaacattcttctatattttaattgactgtttaacttgtatatttcctcaatatgaacacattctttgttatatttcctgtgtgtctcatagttcctagaatacatttgtctatgttgagataatgaatgaattaatcaaatagacatttatgaagaagattggccatgaggacaaatgtgtacatactatcaaatagcatatgcgaataaaatggtagattttagattaatcagcatcatttatcactaaatttaccaacatagctaaagtttaattttacccaattttgtcagactcagtttataaacaagaaattggcatgcattttgttgaattatctaaagatttatctttaactcctaggcatcaccccagtaccaacaatatgaaatttgaagctttagtttttttaaacactttgtaataaaatctaaatttctcctttaaaaattactgacttggttatatttccaccccaaagtgcacacttccgtttcaaccagtgatttatctttgtcaccttttaaagtaaatatccttgctttgtgtcctctaatgataaccaagaagcagtaatatgtaaatagctatagacattatctcaggtgaaacaaatatgtgaaagctgtcatgcatggacttaacacaaaggaaccttatacactactctaggtaatttttcctgcaggactaacagagagacataatgcaggaaaatatcaggaaagaggttcaagaacattttagggtgacctcttatcaaccagttctttaccattttatgagaacacactccactctcatctataatagaacagctattatggattataatttgaatgtttcttttggagtataaatgaattgattcctactctactgaaattgaatgttgttttcctcttctcatatggtgaatgtacatacgccgcagtcaaagaagtctgaagaaaacatttcaaggttttagtacaggtgacatttgtcaatggcctgctagctcttcatcatatttagcagtggagcctgttcatgatgtgggtcacaaatgaggagaactaaaacagtgcactatgtgcaagaattcagaccacaggaaatcatgccatctggaactgctaaatggccagcagaaacttaacagataagcaaggaaataccttaaagaaaaacgaaaaaaacccccacaaccttagtataattacactgttcaaacagtaaataagtataaggtgtaggttatgcctgtgctcatgattaagcagtaggtcaagtttctagaaaatatctatgagaaaaaaatttgcctcccaaaacctgaagtctttaagtcattttaattataacaaaatcttatccatatatatagaaaggtgattattattgtgataatttcattattttgactttaaggatgtaataataaaaattttatgatttgaattgattatgtataagttatgagccacatactctagagatattttccctaggttttaaaacatcgttgaaaggtagcttttattgtcaccatattaccaatgagaatgtagatccaacaactagatccaaaagtttggaacttgtttccaaaagtttgagttgtatcacaatacatcatacaatgttcatttttcaatatcagacataaatatgctcatgtatatttttgtctaaattatgttgtattatttgcttcacaagttcttgttgccatctggatcattaacagaaaacataagacagttgcacaagtaaattataatagttttgaattgatttgcagattcagtgatatgctttgggtcaccatgtaaaataagtccgatgtcaccaacaagcaagagagaaatggaacactaagctggaattttcacaggaaattataattataatcttaaaataatcactgagtacttttccctgttctattgaaatatatttaactctaaataaacaaaccaaaccgaacgagacaagggtaaattttgtgatacagctatactacttgatttccatttgcttatttactcctttatttattttttatttttatagatgtaaggggtacaagtgcagttttcttacatggatatattgcatactggcgaagtctgggcttttagtgttgattcctatttaaattaagtgtatatattaataatggcatcaaagctctaagactcagatctagtacaactgccatttttaatgccatttcatcatcttcgttatcattcatgcaaagtattgacattaagacagattcagcaacagcaagacaaagaacagaaccactttgccaatgtcacatattaatcacatttagtgatactgatcgcatagttgatgctcaattggtaaggcacagtaaagcagctatgtagaagatggagttaaatgggaagactaaagacagagtgaagggattggcagaaatataccctgaaataaattattcccagaaaccctgaaatacaacttaaagtaatgccacacatccccagcctgccagaaaactgcaggtagaaaggacctgggctattatcagattaaggttacttcaacaaaggctctcaaggcaattttgtgttttgcagcctttagctatggaagaaagagtgctgagaacacattctttctggctatagctgcacacataggtgagaatcattgtcaagggaaagtagctattttattctcaccacagccaatggagaaaagaatgagactgtgcgtgggacgaagcctcatgatggaagttgttcccatcctgatcgatcgctgtaacaatctgcggagctggttaactgtatcgatttatgccagcaacctcccttatactaagatgggaaatggtagcgaggatagtgggtcccagttttcataatgtgtccacttgatctacattttttaagttctcaaaaatgattttaacaaagatctaggtttcaaggccactaatttattctacttctactttcccctatcacccatcactttacacacctgatgtattgatatttcagatcaatggaggccgattttgcccagagaagtctctaagaaagaaaaaacagagggaaatagaaaaattgcattatatacctagctacaattacgatagtgaatctgtgtttctttggaatcacagacaattagttttttttttttattctgtatcaccccatataaacagtccatcttcaatgcctttttttccccttttaaaaatctcttttatttctagtatccttttcttataacaagcaattaggtctcagtttccaggaaaccatgtgcacacatgcacacatacaaacacacacacattatggaacattcagataatctacaatcaatcctgctaatcaaaactcaatctcatggatttttggaaatccatgagaaaatgtaagtaagaaaatgtctaaactacttattaagctcacataaaccaatggaatagaacctaatgtgacagatcagatattggtttgggacgaggtagactggataatatatatttgacctggattactcttgattcactatcatacttcatgtaacaaaacttggcctatggttctatctaaggcagtagatagtctgggcatgaagaaatcatgctaccaaacagaattgctggaggagacgctcagcatcgcaaggacttgaggatgatgacacattattctccctgatggtaagcctaaatcagtgttttacatgccgcttcataacaataaatggcttcagcatttctctttctggttgtcccatgttttcctaagatcctacgtaccacataaagcatcttgtttgctacctcctattactataatatgttaattttacttctaataagttcaaaaccaaaaacctcactaccatcactaagaagctccacaaaacaaaacaaaacaaaaaataaaaaccctgaaccaatttcctgatattgagttttctctattgtgtttcaaaaaatatatcagctagttaaacaactgttttgccaaattcgtacacaaaagtgttggataaaacagtgaacctatctatctgtataaactgaatctggaacatagctaataactattgtccctctacaatgcaggagtaataataaaacccaactccttgggcttttgaaaggaacaaatcaatcaactcaaatatggcctacaaaaatcatagccatcatacataatattatagttcacatgatttgtgttgaaggtaattatttcatgttgtaattactttaggtcttacttacatttttattaagactacttaatctatttcttccatttattacttacgcaaatatcagttgaatatgtcctgtatttcaaggttctaaacactggaaattttacagtgactaaggtaaagaccccaccctcatgaagattacactctaactggggataagagatacacattcccaagaaactaaatatgtgtactttctcaagaatgatacacatttttaagaaaataagacagaacaaaggcagagtaaatcagggtttcttgctaggtagggtgctctggaaaggcatgtttgatgatttgatgttttagaagagtcctgaatatattgagggaacattgcacatgtctggagagatggtttcagtgaaatcagcaaatgcaaaggctgagtttgttgcattgctaacatatctgagaagaaaatgagccagtaaggaggagtaagcagaggtcaagaggcaagatatgatactgcagttatcctacagccaaatcatttagggctttgaagaaagttgtaaaaaatctggagatgcatatagtaatttctttaaatgtttctctttcttctaacgacataaattggaggctatatctgttttcaaattagtatatgcagaatgttaactaattagagttaaaagcatttcaaataatagaataaaaaagagtaataaaacacatttgataatgtactatatatttagaacagatgaaatgaaactagtttaaaaatataatatgcatggtaacttataatttcataattttaaagagagattaacagtatatacatgattaacttttttattaaaatgacataacacatttaattttcctccttttaattcaatttcatttagttcacatttaccagtgcattctttgtactcatcactgagtagggcaaaataatagcacttttgtttttttgtttgaaagaaaagtaacttaaaaggtagaggtgcaggcaataacacaactatataccccattcagagacagcacagctcatacaactcatatcttccaagatgctctttttcacctacaaaagttgatcctcaaatgttcggcttaaagttctgtagcagtactcatgatgtgagaattagagagtgtgcaactcaaactatgccatttcctgaacttcctgaagttcatgcaataagtatggcgatgatctcaactggggctttgagactaaacttatcttgagtgcagatgatttctgatctgaaaggaaatgtaattattcatataataaattatatttttgttgtgtatatatatatttattgaaatacattttatgtatgcatgtatacatatatgtgtgtgtgtgtgtgtgtgtgtgtttataatttagggcattttattgtatatgtgtatatattcatgctagattctctgcctatattttcatttcccataacttccaaaagcagtgtctctttctctctgtcaaggagatttttcttactaatggaaccctcaatcttgtacgtggggcaggctagaaggaccagggaactaatgtccttagccagtgctgcacagaagcactgaagtggttcatttccttgagctttctgttgctgattttgaggcctgtgtttcatgctgattcccagagttcccaggcagaagtaagctgtagtattccacaattgtgacttgctttatagttgaagctttgttttcctttcatcccttacctgtttaaactcccaattcccctactggtgattcctggattcactgcctgaataaactactcatacttaattccttgtcttagttatctgctttagggtgaacccaatctaaaacaaatgacatataatatgaaatgcctgtaagatttaaaaatctgcgtcaacactgtgtgggagaaatcacactcaccagctatgtacatgttgcctggtattttccattctcccttgctgttggattaaaattgtaaacattcttctggcctaaggagtgtgagtggtagtgattcgtgtttttgttccaagccaacgcagctcagagccagtcaactgtagctcagagccagtcaactgttttcatttttctcttccactgtcacatcaactttggaaaacaaatgttccacatgccattaaggggagccacttgcctatctgaatattttattatcgagggatacattatttttcagtgttggaccactgaggttttaaaattcattttacactaacacagcctaacatcattatgaccattataaaattgggcagcaaaatgttgctgtctaatgaaaaaaattccccgatacatggaattatctttgttgttcagggatgagaaataagaaaaattaaaattatttccaatcccatctccagtccagcttttagtaggtgtgttgtggtacacaagtgagtttactaccttaatttataaaacatgactacctacatttacaaaacatgtatatatagtactgtactgatttcaacagccatttgaaaagtcaatgagacaattcacatagagttcttggtatagttttggatatatatagtattttctatagatattagttattaggataactttttgtctatatgtgtacatgtaatagatacacatacctaatgtgtttatgtacttattctgtgagtttttcatgtcctatcattttatatttccctcatcaacatattcaaattatagatattccaccaacataaaacttttaccctacccaatttgatttccccaaatgccgaagaaatcttgcttttgctcatcattactgtttgacctgcttcagaaatttatatatcatagtatgctacaaattcagtatttatcttccatttagatctcctgctaataacataagctaattaaggtaaaaataacaaaagttttttttttttttaatgcagagctgctaacagaaatttgagctctagtgaaaaatagttttaggttactaaatataaacttgttacttcaaatttataatagagtgtatggctattgttatttaactataaaacattaagtaacatcttcctagtgtgaaatttggattttattatatcatggctttatgccacttcaaactgacttcaataatggaaaaatatttcttgttattaaaattccatttgtaagaattctgattagttgattaaataaaaaaattaagggtatttaatgatgttaagcatctatggactaaatgttgctttgtatataatatgtaatatacataaggcaatggagcagggattcacacacatacacacacagacacacacatacacacacacacacacttcatgtacatatagctagaccaccgttggcctgacttgagaacattgctaaaaatgcacaattttatttcccatccaggccaggcctgttgaatcagaatctacactttaaacaggatcttcaggtgacccttattgagaagcattggttcatcttacatagcatgatgcatatttatcctttgataaactcatcatgacaaattcatacttttataatgaagtcatatttcccagatgaagttgtgagaagaaaaacgtgtgtggaattttttaaactaagcatgtgggggaaagcttctgaacatactcatctccaaatctcatatcgaattatgggcatttaattgtgttccaaggatatttcttatggcaataaaatattaattaaattgtaaagattaattattacaaatttctaaatactggttttaattaggagtataaccctgaaaaagcatatgttattttagtttatgtgtgagaataaaatcgatatagaagagaagacaaggaagactttcttcatttataagcagaatacctatttactagtgcattggggaaaaactaggctaatatgtttgtgatattatgctaacatattgtgcataatatgctgtttatttgagtatgctttccctattagttggataaatcagagttttttcttcattgcaaagggaatgatttctatacaaaaatttctgtaagaaagttgaaatagctgattatgcaagacaagtaggattttgcctgaatataattttattggactaaataatatgttccatttgctgttcaagctttaaaaatacaaaatattggtttgcagaagtggaaaagggccttagaaagcaataggagatgatgaaaatcattctgtgtgcactaaagaaatttgctctgatatggactatcccttctgacactcatttgtatcctaaaggtggtcttaaaattggtttgtagatgaacacaaacatttttggtaaaacttatgaaattggaaaacgttcttttaatattacaaatcagcatgcaaatttaactgtattattagagatacacttctattagaattacttaatttaaaacaaccacaaatataattgcaaccattgtgctctatccaataatgcagtttgtgacatagttaactgtatttcccactgtgtaaactataccagggagactaagaaacacttttggaagttgtgttccaaaaaggccagttggatattatttaggaaattagctctcattgtataaaaatgatacacttggggcttggaaggtcaacataattttcaaaaattagaacttgtcgacattatgtctccaaagtggtcatattacttcaactatatattattaagaatttgaaaataagaatcttattaaggataagaaaagtaaatatgcttggattcaatgacatcaattgctgtaaagaagattgaacataactagttatgtgaagaaaataaaataaatgaaatacaacactaatctttgcacagaaatatatttctatgtacactagaagtaaactcatgaactcattccaatttggccatatatgtttaatggagaagtataatcatttattatttcatcagcaccatcatgagtcctattagtagtccaattctatgcttattttgtagagtcagaaaatttttgaatattcaaactcttagaaaattatatattattgcaactgctctatacagatatgcaatacatgtctggtttatgaatattttaaacttataaaagctttaatgcagattttatcatctatatttgataatgcaagataatttgcttagaatgtttaatgttagaacgttctgcttaagagtcagaaattgtttctttatatctattcatgcccctttttaaagtgaccttattattttacccatagtgatgacgagttttatgtgttaacttgtctgggtcacaggctgctcagacatttattcaaacattattctggttgtgtctgtgaaggtgtttctggatgggattaacatttgaacagttgactgagtaaagcagatagtttttctaaatgtgagtgggccttactggtggttctttttctctgaagaattctgtctaatacgcccctgtagaagtgaactttattgacaccttgaatctgcatttgatcacggacttactttgggcaatggtacaatagtaaatataacacaataaatatttgaaaagacttgcacatcagtgctgactcattaccactgggagccctcaattattatttgaagatgcccaagttagtctgttggaagatgagacaatgtggaacaaagaagagccattgatgaagacttggataacctgttggaatgttaagcaatatagatcagaaaacattcatcctgactaagttcccctaaactaaccaggctgccacctgtcagaaataattgaggccaacattgttcatccagtcattgatcaaccagtggcagccatcctgccaggtaatataattctaaccattattggttaaatttaaatgattgatttttttactttatagaacattgtttatataaaccaacatacataactgtatatattatatacagaatagcagacaacatgtgctccatgttcacattggtttctgactatataaaagctctggccacataaaagttgcatacaagtcttatcttgaaaattttgatataccttataattttttaatatccatatatagtaaagtataacatttacttgattaaagcaatgaaacaacacctttctgcaactgtatttatttacctacaaataatcctataaaattaaaaaaaattccacttaaatgcacaatatacaaattcattaacactgtcaaaaataagatcaatatcctttctgactataaggccatataaaagttatatacaggtcttatattgaatattttggtatactttataattttttagtatccataagaaaaacatattgatagaaataacaatagacttttattttactaatattttttaaaaaataaattgcaatttgatagttactagatatattgggttttaataactaaatatcttaatttataaattgatgttgcttaatattttaagattataatgtaataatataacacaataaatatacattttgtatgttgctatttgagtacatttcatgttgttgtggtgttgttggcaagactctgaactaattaatgctttaatttaaatctcagtcactctctttttgtaattgcctttgagggatttcagtttcttttttctgcacattttttctacacagattcatcgatgctggaagagcacatgaaacacctgggtcagagacaaatggcttttttcctcaaagtagagcagaaaacacgagctccatgttcacagtggtttctgactatacggccaaataaaagttgcatacaggtcttgtctttaatattttgatagaccttataattttttagtatgcataatgaaaatatattgggagaaataacaatagacttttattttactaagttatttctgggacctccaagactaagggggccgtgagaaatgtcccagtgaatgctgtacacagtgggtttggtcacacctgagggacccagagctccccccagattttaaaggggctactagaagttctgttcaagctttgttccacgtagagataatattttcactttcctgatcaggaaacaaatcttccctctgcagcaggagggtgctgcctctgttcaaagactgctaatcaaagattcaggacaggtctctggatggccttggacaactcagttcccctccctttctcatttgtaattctcaagaataactgaaatgtgctgggaatgcaacatcttgagataggggaagactggctagaatagatcaggctccattccagtcccctctagaacaaaagatccttcagtgttatacacagcatgtcattttgcccccagaatacaaaactcagagctacttgctttccaaggtccctcagctgcagtgcaagtgaggcacacatagacaagaacagattagacttcatttgtcccagacagcttccttgagccttgtgggatggatcacagtgaatcccaggttctcgttgttcctatgagtgatgaacctgccgcatgtagcttgttacctctatgtatgttctgtctcatcaaatccaaacaagtcggtaatcagtgcatggtgaaccttcttcaaaaagatcctcggatatagaattcagaagaaaatttggtaatgtattttcataagacatgcagaaatacaagtgatccatggagaaccgtcttccagtgtgaaatgtctcccacatcttgggtccctgaatggctgactacatagaacagaatagtcattaagtcataactactaccagatataaaacctgatgaagaaacaaaactttttggcattatcgtctagtctaagctaactaatattgactttaagaagtgggaattattcataacaatatgggataatatttatattgaagataattttcttttacacattggatttgccacagaagtaagagggaggctgatggatgtgagaaatgaatccaacattctgcaagaaacccacatggagaaagagacagtttggtcttactatgggccgatgccagcaacctagtatagaagatgtaagtatatcaagatatgggctaaggtaatatttttagctgtattttctctcttctcccacctttttggggttaatcacagccttcaatgttaaataagcaagcacacagtaaagaacaaataaaatcttgcttctgctcacaatctaattgtatatactaagtatgaaacaatacaatcctaaaattatttatgtaatgttatttattttgaatatagttggatatgcaaatttagagtcattccatttctattattgcaaaattctatattggaatataagtagaaatcattgaaaacatggatctatcagtctaatacatggatttctctttcaaatctatctaagatcaagactgagaggctaaggcccagcttgaagagatttaacaaagtatgtacacaccacaagtgacatgatgtagagagaagatcatcagtagtttccaattaagaaatctcaaagggtttcagccaactagtaacctctatgtgacctggtggatctacttactgctttctgctgaattcaacgcaatctccataatcagtgtcttgaaatcagaatcaaggctactgtgagaaaattggtaaatatttatctactggtggaaaatcaaaaagaaaataatccccaactcatatttattttgattttgtattatgcatcagatttacacagcaactagaaactgggtatatggcaagaaattaggaaactgccacacacacactcaggagaattttgtttttagcacataggaataaaattagaaaacatcttttttaattggagggcttggtggttctagaatatttatatactctgcagctgcaatatggctcataattcaaattctgtataaaattcccaagtctcaatgaggactctagaaattcatataagaaagagaaatatgttccagggcaacataaattttttcattttttatttagttctgaagttatatctaaaatacacaacacacaaagtgtttagccaaacataactagaaagactggatatgaaaaggagagtcctgccttctccagacaggtttctcaggaagctccatatttaacttgccttctggcataagcaaagaaattgttagacactaagatcttgaactatttaattcaggtgtatttttatattaaaaaaacaagaaggaaaatctctttaagtagatagtgaaaatttatcttgaaaattacattttcatatggaaggagaaacaaatgaatatgtgaaaatgtaattcacagcctgaagatcaagaagagttaaccattctttcttttttttaaagacatggatcttgttttgctgctcaaagctggggtgcagtgatgtgatcatagctcagccactgcagccttcaactcctgggctcaagggatactctcaccttagcttccagagtggctgggactataggcatgaaccatcatgcccagctaagttttactttttgtggaattggggtcttgctctgttacccaggcttgtctcaaactcctaggcacacgcaatcctctcaccttggcctcctaaaacactagaagaagagttattcattctaaaattctatggaaggattctctattagaaacagaagcaccaacttccataatggttgaactagtttagagtcccaccaacagtgtaaaactgttcctatttctccacatcctctccatcacctgttgtttcctgactttttaatgatcgccattctaatttggtgtgagatggtatctcattgtgattttgatttgcatttctctgatggccagtgatgatgagcattttttcatgtattttttggctgcataaatgtcttcttttgagaagtgtctgttcatatccttcgcccactttttgatggggttgtttgtttttttcttgtaaatttgtttgagttcattgcagattctggatattagccctttgtcagatgagtaggttgcaaaaattttctcccattctgcaggttgcctgttcactctggtggtggtttcttttgctgtgcagaagctctttagtttaattagatcccatttgtcaattttggcttttgttgccatagcttttggtgttttagacatgaagtccttccccatgcctatgtcctgaatggtattgcctaggttttcttctagggtttttatggttttaggtctaacatgtaagtctttaacccatcttgaattaatttttgtataaagtgtaaggaagggatccagttgtggtgattcctcagggatctagaactagaaataccatttgacccagccatcccattactgggtatatgcccaaacgattataaatcatgctgctacaaagacacatgcacatgtatgtttattgcagcactattcacaatagcaaagacttggaaccaacccaaatgtccaaaaatgatagactggattaagaaaatgtggcacatatacaccatggaatactatgcagccataaaaaatgatgagttcatgtcctttgtagggacatggatgaagctggaaaccatcattctcagcaaactatcgcaaggacaaaaaaaccaaacacctcatgttctcactcataggtgggaattaaacaatgagaacacatggacacaggaaggggaacatcacacaccggggactgttgtggggtgggggggaggggggagggatagcattaggagaaatatctaatgctaaatgacgaattaatgggtgcagcacaccaacatggcacatgtatacatatgtaacaaacctgcacattgtgtacatgtaccctaaaacttaaggtataataataatttaaaaaaaaagaaaagaagaaaaaacagaagcagttttaaggcctgaggaataaatacaaagacagtgtaagaaagaagctgaagtttcccatggcttaggggaattaaatgcattgtgttagggggctacatgtttatgcttactccaccccaaattcatttatttaaatcttaactcctgctctgatggtagtaggcagtgggatctttcagaggtgattaggtcttgagggcggagcactcataatgggattagcattcttgtattagtactcttataagacacataacagcttgcttccactctgctctctgctttgtgaaaatacagcaagaagatagccatctataaaccgggaagcaaacccttaccagacactgcatctgccagcactttgatcttggacttctaggcctctagaactataagaaataaatatttgttgtttaagccatccagccaataataatttattatagtagcctgaactgactaggacacgttgtaatagaatggaatgaaaaagataaaaggagatttatatgttttcctagctagattaaagaagtgtccatgaaacagtacgatataaagaactgataccaggatgtgagctcttggaggacagaggggtttgttaagttttgtttgctgctataaacaggcatttatagtggcatcttgccaataacgcctattgatgagtatctgcttgagatttgaatgcacaaattaaattgaaacggaaaaaaaaagaataaccacaaaagataaaaatacaagttttagttgtagcaggaattaatgtgaaggtctcgtatatttgaaagaagcctttcaaaaaatgtacaatgagtctgaggagaccttaggggtggtagtctttgagagatattattagcaacaggataggatgagccaaataacactactattttctcatcgtccaacagagtcccttgcatgtgttgctttgcagggtgccttgtatatgagccctcatttagtattttctaaaagacaaaataactttttaaaggaccgtgtctaaggtattgtttttattacttgttgctacaagatatagcacatactcggagccattgtggctctggccggttgtgctggccctcggggaggcgagggtacgagttcgaggccaacctggtccacattgattgaaaaaaaaataaaaaaaaaaaagatatagcacatactcatcactgtttcacaagaaccaggtagcacatgcatatagcataattccagaaaaagtttcattttcatgctatttacaaaaattttagcagagtataggaaaaaccacaaggaataatgcatcaatccagagttagaaggatcaaagtgtcatctctcgtatgtcctaaatagaaggaggggagtgagcattacctagacccagaggaaagtcttgtagaacaggccacctaaagggaagcactaatcttagttgaaggacaccacgggccccagatgaaaaaacaagggaaatacatattccagcttccgtccccctccggaccattgggcaaacacaactggaatccagagggcaatcaatcattctaatcttgcctgtgaagaatttcccctcacattgggaagaattctgctcatgtttaatattcagcctcacgttcggaagggtgaaacatagctttaggagccaagtggacggtaaggaagcatatagccccacactccagagtgaaggattggtaattacatgcaccattcttttttctaaagtgtttgattacgtatttaccttaataaattgcttattggcattctatagaagagactcattcgtgttttgattattttaaaaacaatttgcttttccataaatccggatcctctaaatttagatctctttagcataggctggtgattgagtcagactattcacaatgaacagaacattacatcacatactttaaaagttaaaaaattcaactgacacacaagaaaattcaaaacctacttcattctgccctgagaacttccctatctttttgttcttttctgcctctacacaaagaatctaggaaaaaagaacactaggtgcttaaaatgcactgccaagttttatatcttgaaaagggtaatttcttttcctgtaataggccattataaattcatatttatgaagtagttagaaaataattcaattaatatgtattatagccattggccattcatctgttccattctagtcattcatttttatgatcacagagtcataggggttctatgtgcaatttgaaattgctctaaaatgtaaagaataaagattgcttgttattttaaagtatctgaatgatgattgatagatacatttcctctgggaaccttatcatttcagacttcagaagctggaaaccatcattctcagcaaactatcacaaggacaaaaaaccaaacaccacatgttctcactcataggtgggaattgaacaatgagaacacatggacacagcaggggaacatcacacaccggggcctgttgtggggtggggggaggggggagggatagcattaggagatatacctaatgtcaatgacgagttaatgggtgcagcacaccaacatggcacatgtattcatatgtaacaaacctgcacgttgtgcacatgtaccctagaacttaaagtataattaaaaagaaagaaattcattaattgtaaactcttaagaatttccacttctgtaagtaattaaatgtagatcaaacactgtaaaaatgtcaactaggacagaatttaaaagtcatctacttctatcatcattgctttatctgagaatgattaagctgagagccacggagaccaatatcatgcagttagctatgtagaagctatatcaggataatgctggacttctaaatttggacctgggccttattcactatcctagtggttttcaaaatgactagagaatttcttgagaatttgggatctcctagtagggagtttattaaaaacaaaataaaaagcatagagacgcccaggagcggtggctcatgcctataatcccagcactttgggaggctgaggttaagagtttgaggccagccagaccaacatggagaaaccctgtctctactcaaaatacaacattagccgggcatggtggtacatgcctgtaatcctagctcctcaggaggctgaggcaggagaattgcttgaacccgggaggcagaggttgtggtgagccaagatcgcaccattgcactcctgcctggatgatgagagcaaaacttcatctcaaaaacaaaaacaaaaaaaacaaaaaaacacacacacaaaaacaaaagcatagagactctgggttctcctgtcttaattcaaccagagtttctcaatattattctattttagaagtaaagtttatgactttatccattcttcttattggtatagtttactatagttttgagtagataacatttttacctaactaagcgacagaaatttattgtctcacaggtctggaggctggacatccaacatcaaggtgtaggcaggggtggttccttctcaggactatgaagttgaagcctttttctgatcttttaatagcaacagcttcaaacatttttttttctaatttcaaatttattttagattcagggagtatgtgcgtaggtctgttacatggatatatggtgtgatactgatgtttggggtacaaatgatcctgtcacccagataatgagcatagtacccaataggcagttttcagtccttccctcctccctttctctcccctctactgccccccagtagtttccaatgcctattgtttccatatttatgcccatgtgtaccctatgtttctctctctcttataaataagaacatatggtatttgattttctattcctgctttaacttgcttaggatgacagcattcaactgcatccattttgctgcaaaggaaataattttgttctttgtaatggctttgtagtattccatggtgtgtgtgtgtgtgtgtgtgtgtgtgtgtgtgtatacacacacatatatatatacacacacacatatatatgtgtatatacatatatatatatacattttctttatccaccatcgatggccacctaggttgattccatgtctttgccattgtgaatagtgctgtgataaacatataagtacatgtctttttcgtagcatggtttattttcctttgggtatatacccagtaatgggattgctggatcaaatggtaattttaagatctttgagaatctctaaactgctttccatggtggctggaaatttacattcccaccagaaatgtataagcattttcttttctctgcagcctcaccagtatctgttatttttattattttttattttttatttatttttttttaatttttattcctagtcattctgactagtgtaaggtggaattttgtggttttaattagtaatgttgagcattttttatatgtttgctggctgcttgtaagttttctcctaataaatgattgtttatgttttttgcccattgcatatttttttcttttttttctgctgcccaggctggagtacatggagtgaggtggcacaatcttggctcactgcaacctccacctcctggattcaaaagattcttgtacctcagcctactgagtagctgggattagaggcgtgcatcatcacgcttggccaatttttgtagttttaacagagacagggtttcaccatgttggccaggttggtctcccactcctggcctcaagtgatctgcccactcggtctcccaaagtgctgggattacaggtgtgagccacctcgcccggccttgcctacttttcagtgagcttgtttgttttttgcttgagttgtttaagttccttgaagattctggatattagacctttgtcaaatgcatagtttgcaaatattttctgccatcctgtaggttgtctgctttctgtgttgatagtttattttgctgtgcagaagctgtttagtttaattaattcctgactgtcaattttcctgcttgttgcaattgcttttggggacttagttaaatatttgccaaggctgatatctagtagtgtatttactaggctttcttctaggattgatataatttgagttctaacatttaagtgcttaacctgtcctaagttaattgttgtatgtggtgataggtagtggtccagttttattctcccacatatgcacagccagttgtcgcagcaccatttattgaattgggaatccttttattattgcttatttttgtcaactttatcaaagagaagattttgttaagtgtatagctttatgtctgggttctctgttctgttccattggtctgtgtgtctctttttgtactggtaccacgctgttttatttactgtaggctttatagtctgaagtagggtaatgtgatgcctccagctttgttcttttttgcttagcacatgaaatctaagctgtgtcaggcaatgactctcccaggtaagtacgccctgtggcactgcagctgaatcagatgatatggccacgtgtgccaaaatattgtatagagatggtactggagtctttgcctgcgccagccaaaactacatgtaaggaaacattttgagaaactggtgattccacaagtaaccaaaggcagtgattccgcagagagaggcatgagaatagagtaaatgcacagaaaatggcaaagttgagagagatggatggctccatcagagagagtgatttctgcttctgcattcagctgtatttcctgcccttgcatacccatgagattactggtttatctgatgaacgaataccagctttgttaagctaaaatctatgcagatctattatggaaaacaattatccgtaattaaggcaagataattgtctcaagaattaagtatataaataaattttgagagaatctttaaataaagaaggaaaaatatgtgaatacttggaataagtaatttccaagacttaagatgtatttttagaaaaagttcaagttgagaaggaagtaaagctaattatttttttaatttaaagaatattgaacaaatgagcttcagagcagtaaagaaataatactgacagaggctacaagggagccagtctaattatgtaacttactgtagagacaaaatcaagatggagcaagctggtcaataattgttgttttatctaaaactctatgtaattgtaattaattgcattttaattaggaccttcaatgcaagaagagaaaccaacattgacttttcctggaatgtaaggtacgatttaactattcaggtaaagaaatgacagctgtagaactggatctcagaggccatctgaaaactcaaaaatactacgttctctttatctctagcttttctctcttaatctctctgtgtgagtgattctctttactggcatattttcaccacatggcaagaaacatgtcagccaacagtttcctaattgtaaaattcatagctgtaggcaccatgagagagaatgaccagcagacagtcccaaacctaagtcccatggaggtactccttggcccagattaaatcaggtatccatatttggattaatcatctgctgttagcagacagaatagcaaattaattgccaagacactcatggttatatgtgtgggggacaagggaaatatgataagcaggataatgaccttaaagatatctttaatctacagaacctgtgaagggccaaagagagaattctagaagccgaaaaaaattactttttagagtcttcagaagggaatgagccctcccaacaccttcattttagaccagtaaggcccatgctgctttctgacttgcagaatttaagataataatatttttaaagccactaatcttgcagtaatctattaaaacagcaataggaaatcaatagagagaggaagggagagacattgtaaaagggatgttgggatgactacaccatatctaataacaaccatattattgtggttgatactgtcaagctctattgacatgctgtacagttataaagcctcagaattagagatagagaaagataactcaaagttgcctcaaaaaatcatatcttcaaattacaaatcttcatggttcatataattattacactttttatggtttgttttaagtgcattaaaactttaggtttgcatatctatataatattcacatttaaacaaaattagtgaaaatttatgcattgatttaattatgcattttgttgagatattttttaaagcaggaaaaattattttgtaacatgaaggaatcatatctatattgttccatttgtatttttcaattttactataatgttcattttaagggtatagactttcatctgaatttgaaatcattacatagaaagttcaaacaaaatcaatgcaaaggcatttgtctatttctataataattacattaatgatcaaaagaatatctatactaaataaaatattgcatttttattttcttttggtgtatattgaaaattgatctgtgttttagaaggaatgaaactatcaaacatattatggtaggcatggcataaaactgggtaaaagaaaatcttctttagttagttaatggattatctgttgctaaactgaaataatcaaaaagtcatctaacatcaacttgaattccttcaaaaaataaaacaggtatgcaaatagcattcaaaataaggaaagttgtctttattaaccatgaaaatggtaaattttataaatttagaattgactactctcttcatcttatgaaaagtggtaaaaatatgtaaatgaaatagaaataattttgaggtgtttattttcacttacttagaaccataatcacaaaatcaattcctagtcttcttgatgacataatactgaaaaaaggaaggtgtatttaggttggagatttatattttaaataagaagtaaccctctgtataaacaatagatcctggtttgtaatcccagcactttgggaggccgaggcaggtggatcacgaggtcagtagatcgagaccatactggctaacacggtgaaaccccgtctctactaaaaaatacaaaaaattaaccaggcttggtggcaggcacctgtagtcccagctacttgggaggctgaggcaggagaacggcgtgaacccgggaggtggagtttgcagtgagccgagatcaccccactgcactccagcctgggggacaaagcgagactctgtctcaaaaaaaaaaaaaaagatcctggtgatgatgatcactcatagtactatgggctgtatgaattgtatggaccatttaggggcacagtgagaaggtgggtacttgcaagtcaatgagagaggactcaggagaaaccaattctgccaacatcttgatcttgaacttctaaccttcagaactgtgagaaaataagtgtctgtgatttaaaccacccagtatgtggtattttattacagaaatactagtatactaatattgtcatgttaatcactcttgtattaagatgaaaagaaaacatttaaagctatagatgcctcttactgcatcttgtgcaatgttccattgtgcaatgtccttaataccatttctgtggaattagtttaaaacaatagttcaacagcacaattaaatgtcatgtatttacaagactctcgtcatgccaaaaacattgacaatgcttaaaacattgacttattgtgcaaaaaaatgcaacattattatgtgcatacgttgagaaacaatttgaggatgatcaagagccaatatgaatgggatgcaggcctgtttctaaaatctctgaaatgcttcatatattttaaaagctaaacaaaaagtaatagacattaatggaaaacaatcattaatttatattatttaaggacagtggataggattctgttatttctgctgtcctttatctaaaataagcttgctttgttttaaacttcttattgcttctaagcattctttagaagaaaagatttgagaacaataataattaaaaactactaatgaagtaatatatttgccagcccagcccatggtttacttataaaagtttccaaaactgaacatttcaaaagaaagagtaaggttcaacttacgctattttttttaaataaaacaacagatgcagaaggcagtgtcacagtataatacccaaactattgcaacatatcactattgttaaataaagtacctataaagttgatattttaaaggaaaaataaatataaatatataagtttgggttagtatttttcttgtttttagcacaattagctcactaatttaccctaaaacccttatgatcatttattcactatgccttataagtgaaacagctttttggttgaggttttgtctatcttagttactgctaactatatagatctaatagattagtgaccatactttgtaaatgtgaacatttattcctctggacatgatttttgtccaacttggagtaacataatccatttattataagactgggtgctatggactaaatgtttttgttctcccaaactttatgcgttaaaattctaaaccccaatatgatggtattaggaaggggactctttggaaggtgactaagtcaagagtggagctctcgtgatgggattagtgcaaattactctagagctccgagctaccatgtgagtaccaagcaagaaggccgggtctatgaccaggatttggcccctcaccagaacctgactatgctgacaccctgatcttggacttccaggatccagaactatgaggagtaaatttctgctgtttataagctacacagtctatggtactttattaaaacagccacaaattatgacaccgagaaaaaatatcagatataaaataatactacatcatttatgatcttgtttttgtaaggtacaataacagcaaaacccttttaggagtgacaatagcaattactcagtgatccttacaggagttggtaagtagtgactggaaagaaagggctttctaggaatgggttaatgtgaaaactcagcaacttgcatacttgcatatcattaaaatgttcatattacccaatctatagattcaatgcaatccctttcaaaataccaatgacattcttcacataaataggaaaagcaatactaaaatttatatggaagcacaaaagacccagcataaccaaagctatcctaggcaaaatgaacaaaatggggggaatcacattacttgacttcagattatactacagaggtatagtaaccaaaacagcatagtagggcatagaaacagacattagggaccaatgtaaaaaatagagaggcaagaaacaaatccagacacatatagtgtgcccattttcaacgaagttctcaaaaacatacactggagaaaatacagtctctttcaataaatagtgctgggaaaacagactatctatatacagacaaatgaaactagacccctatcttttactgtatacgaaagtcaaatcaaagtggattaaagatttaaatctaaaacctcaaaccatgaaattactacaagaaaactggggaaaatctccaggactttggtctgggcaaaaatttttcgagcaattacacacaagcacaggcaagcaaagcaaaaaatggactaatggaatcacatcaagtttcaaagctgctgtggagcaaaggatacactattaaccaagtgaagagacaatatttgcaaactacccatctgataagggcttaataaccaaaatatgtaaggagctcaaacaactatataggaaaaaatacaataatctaatcaaaagatgggcaaaaatttgaataggcattgcccaaaaaaagacatacaaatggaaaacaggtatatgcaaaggtgctcaacattattgactatcagagaaatgcaaatcgaaactacgatgagatatcatctcaccctagttaaaatggcttatatccaaaagataggcaataaaaaatgctcgtgaggatgcagagaaaagggaacccttatatactgttagtggcaatgtaaattggtataacaaagatggagaacagtttggaagttcctccaaaaaagaaaaaattgagctaccatataatccaataatcccacttggatatatatgcaaaataaagaaattagtatattaaagagatatctgaacttctatgttcgtcaaagcactgtttacaataactaagatttggaagcaacctaagtgtccatcatcagatgaatggataaagaattgtgatacatatacgcaatggagtactactcagtcatagacaagaataagatccagtcatttgcaagaatatggctggaactggagatcattttattttttaatttttatttatttatttatttttttgagatggagtctcactctgtcgcccaggctggggtgcagtggtgcgatctcagctcactgcaagctctgcctcctgggttcacaccattctcctgcctcagcctcccaagtagttgagactacaggtgcccgccaccacacctggctaatttttttttttttgtatttttagtagagatcattttattaagtgagataagccagacacagaaagacaaacacagcatattctctcttatttgtgggttctaaaaattaaaacaattgaactcttggagatagagagtacaagaatagttactagaggcttagaaaagtattggaaggctgaaggagaggtgagtatggtcaatgggtacaaaaaatacttagaaagaatgagtaagatctaccatttgatacacagcagggtgactacagacaatgataactatacattttaaaataacttgaagagtgtaattggattgtttacagtccaatggacaaatgcctgacaggatggataccccaattttcatgatgtgtttatttcacatggcatgtctgtatcaaaacatgtcatgtaccccatacatatatacacctaccttgtacccacaaatgtttaaaataaaagaatttaaaaattaagaccatattaaaaataagcacaggcttttaacaataccagtgatgcaatataaagatgtttacaaacaactaaaaacactgattaaattatgctactacacaatgaaaattattatattacattttgtgtttaatcaaaataagcttattttctttccatgtatattagtttacatttaaactatattttatcttcagaaacatttcgacataacttacaaaactcccagttcggtagtggcaatttgctagttattaaaatacattttttaaaatgtataatttaatttttagtatcttttttctcattcagacatgatctagtattgttgataatttatagggccactttatctaaataagttactgaaagtacttccagttttttacaataaatagataagagcacaaagataattgcaatacatttttgtagcttctaaacattttatcattctgtatttacattttaatttgatttttagtttatattttagttattgatacatatttggccacaagtactaaaattgtgtcttgattagctagatataatttgcagttgtcaattctcttatataaattatttacttgaaaatccaatgctaaatataaagttttattttgagaattatgctcacaactcgtgtgtgtgtgggtgtgtgcctgtgtgtgtatgtttgtgtgcgtgtttatttcctttatccttcagctcttaaagaggagggacatttaaaaattttatagtcatcaaagtcttctttacttgagaaaatgtttaagaaacgcattgaaatatacatattttggaattattgccatcagaaggaatgtttcacttggttccatgaactccctgaagagcatcctcgaatgtccagatcattagtaagaccttggagatttagcagcctttcaataattcttaatagtactacaggtgtttttaagatcatattaaataaagccactgacaatttaattttttaaaaagaaaataataaaatatatttgaagggtttgaaggatccacagggcagaatagatgatgtataaaatgaggtttgtgagtcggtcttcttcattaaattttagttcactatttttcactaatcaattcaaagactctaagtacttcttttttatagtagaagtaatagaagttggtacaagtgggacaaaaaataggacttctgatactggatcttgctgtaaaataaaagctgcaagtttattttcactcttgttgaagccaaaaatggccattttgggttaacatcaagaatgtaaattccaaccaaatgaacatattggggatgaaaaaatataagttgataaaacatgaaacacaacaatttaaagaacaaacattttgaaaaaatatttaatagttatattaatgaatatttattttaaaataaatttataatatttgttttctttttctttacataaaaactaaaatagttttataatttatgcctatttttctgacactcatgcaggaagtattttaaagtgcataaatagttactaaaatccaatccattcacaatcttttgaaatatttaattaatatttatgtaaattgtttttatcacaagacaataatttttctccattttcttgtgttttgatgttagagggacacattttctttctagttaatgtaataagaaaagttaatgagaatctatttttaataaacatgtctaagaataaaacattaaaatctgtccctaagggttataattgtgaaatgttctaattgcacacataatcaattttgatgcaccaaaattaatttcaacatcaaaaaataatatttcttaactagcctcttttttgtgtatatatattatgtgcaattaactttggtagactgagaagatagctagcttctggtgagagtctattatagtgaactggtctcataggcacattccagctacctgaactgcttaaacatcaaaaccctcaagggccaaatagaaccaggtacagattatacacccaattactatttctaaataataatgagaagctgatatgtcttgccccaacataactagtgaaattctggtaaccaagtatcatttatatgtagtttatatattccatggtgttcctcattggatccccagaattctccaggcagttctagagattagcatgtggtcaatccaggccagcagatactaactcatatgttatagataatttcagctgtttaaagcatttcgtgatatagaaacactctggccatcacaatctcttaccaagtggccccatctccctctctagcttgttggtttactttcctactgctcccagccctggggcccgctgtgctttactcagctttatgatgaaggccttctaattcttcctccaaaacctggacctccctcaccttcaggcccttgatactctttgcaatgctttctacacagtctttttgtgagaccaccccttctcatcacagatccatactcaccttctcagggagaccttctttcaacattgtcggggaggaaacatttctcccgtatcctgttggcatctctggctgggcctaagaattaaactgacataaaacatattaacaggagaaaagaatacaacttttttaagacgttgggtggcatgttctaaactccttgaatatcctacctatgagagtccgcctcatggcagtgcacacaggctgatatattatttctcctctgtttctcccatttaaatgtaaagcacgtgagatcagaaacagcgtatttccagttccttaaactatgtttgtcgcatgttattctggcttacatttgcgaatttacatttgcatttacatttgtgaattcataacaatgaatttaccttattagcctcatcacttagataagcaaaacaattagatttgaaaaaatagtttaaatattgaagtcattttacgtatattggtggatattatttatattcagaatgatccatacacactcgatcattgtgtgataaatgtcagctctacaaaggtcaccaaagagtcacctaatttttaattactgttgatattgaaaggttgataagatcaaacctagtctgtgtctccagactttcatgttgtcaatgtgtcataaaaacatataggccatatcttgcattttctattaatgtgacaaacaccatgcttttgaagccatcttttcccagttgctggtacagcttaatggctgtagaaagtctatatttgtatcattttattgttttttcttctttttctttttaggtttcaaaaatatcttgagaaattacatagaaaccgaataatactcaaagaaaaaaacattcctcaccttccaattaatgtacaaattatacctaaaaggaaattttacagcagttgatgttttttatcagcaataatatagcttatcatctgctttggggaacataatttggagaatttattttcttccccattttttcaggttaaccaagcctaactcttcttttcaaattacactgaaacttgaagaattaatcatttggggtagatgatgctccagggtgcttttgagaatgtgaatcacctttaaacccatggtgttgctctgaacatgaggccaccaatcctgccctgagccataattcaaatttttctgagccttgaccactagttctagtgacaaatggaacagattctacaaactaccttgcacaaataatgcttttggattccttgttgtactcacttgcagagctaaaagacccatttgtcttctaacccttaaggacaaaaatgcattagtctttctacttctaatccaatcagtgccattttttctcttgtgagtgaatggttgtgcggagcctctgtctgtcattttaaccactggcttatgaaagctttcagtgtgattcagaactctatattctcctgtaaccttcatcacaggactttagttgaaaagaaaaagggagatgcctcagaataaagctgtttttaatcttagtggtgtcttaactttatatagcacttcaaggaataaaatcactatgttaaatgatctatatgatagaataacaggtaatattaatttttacaaaatataaaatatatttgttaaattaaaatgttctaattagtttgaatggaagcatagtgtaccggtcaagaccatgaacttagaacacagatacctgggtttaaatctcaaccagagccaagacctcactgtggggctgtgggccaattctttaattatgttgtgatgatcacctctgtttcctcaattacgagatgttaataagaacagtaggtatataagtgacaaatttaggtatcctgtgtttctggatacctcaaatatgtatctatgttttacctcatgtagattttaaattatttacagaaaattttgatgaatcaaactgtgcccaacgttagtttgcacatactttgtgtctaacaaataacaattgagtgcttgattttgaaatttaaaaaagctaaatttattattaattttgtcatacaaattttgtgctgatcatgatagcagagtttggctaattgggaaaatattctttaaaattataagggagatgttcttggtagccagccactcccgaacatacttcttataaacttccaggaaattctgctatgactgttgcaattaagggtgtataataaagaactacattggcagagtatcccatatgtctttgtcttggtctcaacttagatggtatctcataatcaggagttctgattttggatccaacttagtaccctccttagcactggttacttccctcttaacacagtgaccaatacttcaggaagagggagctagactaagaggctatgatacagtatagaatgataatagctactactgaactgccaagtcagcaggtgatttaatgaaagatatattgcatcagacaaaaagcagatgcaaatcagattaattaaagagaatgtggaatgataagttctaggcaaatgttggcatacaacattctaattttcccattctattttggggctaaagatgatttcatgtttgctctactattgttagatgttactgttctataaatgtcaacaaggacaagtcagttaatagcatccttctgagtctgctaagtttctatctactctttctattaattagagaggagagttgaaatctgtgagcatgactttatatttttctatttttccttgcagttatatcagttgtgtgccatataccttgaagtacagttacaagatttataaacatttagatgttcatgtgttcttattgaattgataactttattattttaaaatgaccctctaggaatgttctttattcgaaatctattttgtcttataataatatagccattccaggtttctcttgattgttcttagcaaaattttaattatatttgctaaataaaaagttctaattatacttaaagtgagtttcttgtaacagcatataggtaggccttgtcctttttatgcaatatgacaatctgcattttaatgggcattgaaaccgcttaatctaatgtattattgacatcttcgagtttaaataaatttactatcttgctatttcttttctatttgtcctacttgtagtttgtatcatctttcctgtttttttttgtttgtttttgttttttttaagtgccttatatgtataaatcaatgatttttttaactgctccttgcagagaagggccacccataggaagtgtgctttgagtagccccaatgattttttgtgattctgttttatcaacttttttggcttattagctaggatgtgtatgtgtgagctaggatgtgtatgcgtgtatgtatgtttgttgtcttagtagttgcttcatgatttataatatatatctttaactttttacaatctacatccaataatattataccgtttatgtgtagtgaaagaaccttacaaagatatgtttttatttaaaatcccctgacctttgtactgttgttcccatgtactgtgtgtctatatggtccacaatacaattatttttaaatagctattaccttcaagcatatttaaataagaaaattattttacatttaactctgtaattatcatttatgctttttgattttctttattttcttgtgtggatccagatttctctccagtatttcttgcctccatttcaaacacttccttctactggctataaattctgtcaataaccctttgttgaaaatgtccttatttcatctatattttaaaatacatttctactaggtaaagaattctaggtgaacagttattgtcttcagtactttaaactttttgtttcattatctgaagatgctcatattgcatatgataacaaatggttttttaaaaaaatttactttgtgtataatatgtatgtttttctggctgcttttaagattttcttaaatattttgtaaagatgtttaaggttttaaaaagattttcttaaaatgaacgacaaacacattttaagcactttgggtacgatagactttggtcaaattttgttcattttgttgtacttcagtttcttaaccttccttgattttggagtttagtgtttcttccacttggacaaattttgactattatttcttcaattttctgtgtgtttggtcctgtttctctccctctcccttgagagcttcaattacatataaatcaggccaataacctgaagttactccatatctcactgatgcttttcaccttattccagtctttttctctttgatttttaccatagattctatttattttcagattaattaatgcttcctccttcaatgtttacgcatttgtttttccagataagtgcattttttacctcagatattaaagcttttatttataaatgtgtgatttgggactttttaaatatccgtgtctttagttaccatgagcagtctttttgctggcttctgggagatataataataactattttaataattttgctgttaatatcttcatcttttctgggtcataatttattgatttttttcagtattatgaattaccttttccttcttctttaccttactggtaaatctcaactgaatgacatatattaagaattggcattttcggggtcctggatactttgtattcctataaaaaatatttagctttgctccagtatgtaattaagaaatatgatgtattactcaccatattagtttttaagtttgttaaggaccagaataacatttattccacagtcaatttgaataattatcatattgtaagaatatcaaaaaaacttcaatatattctgtatcatggctcatgaattacaggttcagcatcccaaatctaaaacaatctgaaatcagagacatttttggtcctaagcatttagactaagggatattcaaactgtatcaggtctcctctctaacttgtaagaataggcactatgccgtatattgactacatttacttttgcctgtaatttttttgggcagttctttccataattttctctctataaagtactctactctctggtggtctgccctaggaactctaactgccttggtctctccagattcccaactcagttccagctcaactcagtgatcctttgcttgacctggattgctactccttatgttgcagcctggaaattttctctaaccagtaactaaactgggctttgctgatggaaaatctaggacattcactctcagagatcatttactcttaaaaacttttattgactcaggatcaagtagaaccaagtctcacttaagatttgacagagctatcactgtacaaagaaatttttaataaaatgtattttcaaaatgaattattgaaactaaatgaaagtgacaggctccagaaaaaacaagaaaaatatgttattctgaaagcaaatgtagcttttaatagaaaacatccaaagataaattaggattattcatttagtcaaagaactgctagggcaattttaatggctgtttaatctattaatggcactaaaacagactcttgataatcattaaatcaaggtagtctcaattaaactataaggatgtagaactaaaaaaaggtaatatgatttgtgcaaggtgatatgatttgatgcaagagtacttaattctgtttattaattctgggatctggtctctataaccatattacataaattacataaataaatgatgttagtgaagacatacttaaaaataatcactagaaaatatattatatagatggttactcaatttattcatatgtaggaacttttattgtatcactgcaaactttttgggccatttagaactgaattgcccctcaagtcccatatttgaaaactgatctgacaaaagaattatctaaaaactggaagtaaacgctgagcctactaatttatgccagcttcaattctcaaaatatgctatgttcttattgctaagtctaagtgagaacaggtgtatttaatttgtatttatttcagaacagacggcaatgtaatttgtcatgcaaaatatctattatagtgtcattgtgttatatggctgttatatagactttgtgatctggactagctaatgacagtagaaagatttagctaaagatatagtcatatacatgatatgtttctaaaggaacttgactgagaagtgacctctttcctttattattagaatttattgacattttttcatgccacattcagcaatttcatttgtttaaatgcaagctatattcatacactttattccattttttaataatttgaaaaatattgttatgaatttcaaaagttgctcataatttttataaattactatcatatagcagtctattcttaaacaatagacatagaattctgtatggacacaaatactatttttctacttattaggtgttatttctacttcatatgctaacattctgaaaaacagtaaatgacctcttgatacattaaactttttttaacatcaaagattttccaataaactttgtgcctcttaaaggaataatttcaacatgctaactaattttcataattgtaagctgtccaagatagcagaaagtgcctgttagattctcagaatatatcctttgtagtctctgccatttatttgttatttgacttgaggctctttgaattgatcaaactgtatctagttgttcacaaaaggcagttggaattgcattaactgtgacaactctctgaaagggtggtttctagaataaaattatgtagaatggataaagatgtattgaaagtcacaaaattttttcaaattaacactgactgagaaaaatgaagtgtcattgttacttgcagaggttagtgtattgaaactggagagaagaaaaatgaaagcaattgtcatatcacaaagagaattttgattctgatcattttatgttatctggtcaaatttgggtatttcaaaagaaaaactctctacagtgtcttaattatgttataaagtgtacagagcagctcagcttgttcccacattagtttctatttatggtgcattacagaattctgccatattatgttgaagactcaaaaagagcattgataacacatcacttaaatgtgacaccttaatattgccttcttattgctaaaagtgctcataaaaatttgatgagattaaattggtacctttttacttactttggctattaaattcaattgatatttgatctttttatagaaagaaaggaggcaaagtataactttcaatggtttccccccacccgccgaggactaataacacttggaagaaagattcaacacaactaaacaaattggatgcagcaagaaaatctctttccttgccttaatatcaaacactactccaggtgcagcaaaagcttaagtgtagtaggtttagccctgtagctccacttccactcagaagttttagagaaaaattataactggatgacacagtactcattttccttcttattcccttctttcaaaatgtacagcttacttcatcacagcctcatcattagagcatttccttatgcattacctgtagtcatctccttggtactattcaaaagatgaacagtttacttatctctcccttataagatctagttattcactgagaaatgttccttaaaaatacttacaggatgaatgagaacaagttatgtgaaaatacataagtttcatttaacctcaacatcaaagggtatgttgaaatcaaagaaattttaaacgccaaatagttattataaaatacatgtttgaaagccccttgagaacttcataaaatcaagaaagaggaaatggatgagtccttagcaactcacagagccagtttcacaacctcctggccttgtggcttagctatacgaaatagatgaaaaatagaaagcttttattcatcactcatgttgttctccaactaaagtcctttaaacagagaggaaatgcaaatccaagttgccttctgtaaaaaaaaaaagtctgcaaactgacatttcaatgtctttatacattgacctctaaaacagtataaagtaataaaaactgttgggtgaaggataaagacaagcaatagctttataacatattcataaaagatgccacaatactgccatctacagcttcagtatttgccatttttagatattacaatgcatgtttcgtattttaaaataagaagaacatgtgacttgagttgtgtgaacatgtgatatgagttgagggtcatgttgggtgaactgctgttaataaaagtataagtggatttcaggatggagatgaaatgttaacaatgaacaaatcaatttataattatttacatacaactgtaattgaggttatttataatgtttaaaattagtatgaaatttacaccaccattctacatatttcagttttgataatggtctgcttgaagaaaaggaaagagaaaaaaggagactccaaaatctttttcttgtcaaagagacacaccaagaagattgtcactgctcctgtttctttccaaagtcattgattgcccttgaccttaatacagcctcacattaagatctatggagatgaacagactgtattagaaactaatctactttcagaattctagtgtcttctcagaccctgtattgaagatctgggatcaaacctcaccaccattttcagctcctgaaatacaagggtaaaagacctcggtgagaaatcatgcaagcagcctttcaattctaaattaaacacccttttttgtttgctttgtttaacggacgtgatagaataaattttctggttaaatcttattatttattttttgtttttgtttttcgagatttagtctccctctgccacccaggctggagtgcagtggtgcaatcttggtttgctgcaacctccacctcctgggttccagggattctcctgcctcagcctcccaagtagctgggattaaaaggcatgcgccactgcatgccactatttttttttttttttttttttggatttttagtagagagagaatttcaccatattggccaggctggtctcaaactcctgacctcaggtgatctgcccaccttggcctcccaaagtgctgggattatacaggcatgagccaccgcgcctggccaaaaatagactttatttcttagagcagcttttctatccaaaggtaaatgctattttgctattttattcttgttttgtttttagtgagagtgcatattgtaccactcttgctttgttttatttggctgaatctaaggggcagattggcctatactaccctttgactgtgctgattctgtctagtaggacaggataacaatgacttgctactatacagagaactcactaaggagaattcttttaacttgtattttaagttcagggctacaaatgcaggtttgttccataggtaaacttgtgtcatgggggttcgttgtacaaattatttcatcacacaggtatcaagcctagtaactattaattatttttcctgatcttctttctcctcccaccctccaatctccaaaagactccagtgtgtgtcgctcccttctgtgtgtccatgtgttctcatcatttagctcccactgataagtgagagaatatgcgatatttggttttcttttcccgtgttagtttgttaaggataatggcctccagctccatccatgtcctttcaaagaacatgatcttgttcttttttatggctgtatagtatgctatggtatatatacaccacattttctttatccagtctattattgatgggcatttaggttgatccttgtctttgctattttgaatagtgctgcaatgaacacatgtgtgcaagtgtctttataatagaatgatttatatttctttgggtatataccaagtaatggcatttctgggtcaaatgggatttctgtctttaggtctttgagggatcgccacactgtcttccaggattacccagcatctataaggagcttaaacaaatttacaagaaaaaacacacacattaaaaaaagtgggcaaaggatgtgaacagacaattctcaaaagaagccatacatacggccaacaatcatgcgaaaaaaaagctacatcaccgatcattagagaaaaggagaacttttgcatatgcctcactctattgaaatctcgtaatgtggttaatattttgtttgtttttcattaaaatttctattgctctggtgttgctgaatttggataaataacttagacacatcaaagagattagtctgacaatttttatgttaagaattatggaatgtattgatggttgattgtccatgtatttctgatcaaatagtcagaacacctaaaagacaggcaaagtttcagtatagaaaaccaggaaaactgatcaatgatgaaaacaatatggcaaagcaataaccatagaaatagacccactgaatgtttctccctgtcagaaatcagtgtttcaataagcacagggcagccattactctcctttgaagaatcaggctcagctacttcatcccttccctacttctccattccccgctcagagagggtaacatgcctctgaaatggttaagattaagcaaggcaatatgcccttaggaacaaataagcagaagcaaattgccacacactttgtggcttaaagcagcaaaaataacaaatacacatttcattgtagttctggaggtcagaaattcaaagcaggtctcactgagccaaaatcaaggtgttaggaggcatgggttctttttggaggctctagcagagaatctagagtttcctagacttttccactttctagaggccaccagcattcactggctcctggtgtattccttcctcaattcaaaatgtatcactccactttgcttcctttgtcatatctcttttctctaatctttatatttttgcctccatcttataaggaattttatgattactttgggccaatctgggaaatctaggataaaatctggagcacactggtttgatcatggctcactgtagcctcaaactcctaggctcaagcaatcttcctgcctcagccactgagtagctaggactatgggcatgcacccccttcacctacctaattttgtgtgttttgtagagatgggatctccctatgtcacccaggctggtctgaactcctggcctcaagcaatcctcctgcctcagcctctcaaattattgggattacaggcatgaaccattgcacccagcctcaagatatttaatttagtcatctgtaaagttccttttccatataaggtaacatatttacagattctggggattgggacatagatatttttgaaggagtgagtggggcagtgctgttagaaatattcagtttgccacaaatgctagtcacatgcaagggacgtagcttccagtgacagttttgcaacacttaatagtctcggacacagtgaacattaaaaactctatttttccttcactatcacaattctgcaataacttccaatacataggaaaggtgccaaaataattattatggaataaaatatcttctgtgaactcacaatgactgaaatttaccattttaggttattctcttctgctttccttgttttattcacaaaagcatttatttttccagttcttgaaaagtgccaagttctttcccttcttggtgccttcacatataattaattttctgcaccgccgaagtcttatagccgaatccactttttaatagaatatttaatgccttatggtcttcaagcttttgtgtgtgtctgactttgcatcatcactataaggtggacaagggaaatatcctgaacactgagttaattgctgttcctctaaaaacaaataaataaatacaaacaaaaaaagctgttttgtagtaaattgtgaatttgttttaaattttcaaaatgtgtaaattcatgattaatgtaaaactagccaggcgcggtagctcacgcccataaatcccagcagtctgggaggctgaggcatgcggatcacctgaggtcaggagttagagaccagcctgaccaacatggagaaaccttgtctctactaaaaaatacaaaatcagctggtcgtggtggcgtacacctgtaatcccagctactcgggaggctgaggcaggagaatcgcttgaacccaggaggcggaggttgcagtaagccaagattgtgcattgcattccagctttggcaaaaagagtgaaactctgtctcaaaacaaattaataaataaaaataaaaaaattaaaacatccaaacaatgcgaatatatttaaataaaaagtgtaatatcaacatcagcccctccaatcctaacctctctccaaaggtttacactttgtagctcaaagcaggagtcacccaggtatctcactttttcagtgggattttacattgtctctgcaatgctaggattgcagctcctggttgtcaaagggagaattcaccaggaacatggcaagggtttcaatgaactccaaactataaatgtttgcaaaacactgtagaattcttgtagctgggaagtagccagcttgaatagaaattgccgttcattgagggatagttgactctggtcaacaggtggtagttggtttgcttttacaaaaatgagagcagagagaaatatgtatggagccatgtcactattggtccctcctagctcttcactgatccattataatggtgaatggatatgagcagcaacccttcctgaaaggaacacggcttccattgactcaataatgatggctggtgtcacactaatgaatagttcactaaaaactaccaaagtgaaagcaaagggcaagaataatttagaatgaatagtataggagagagagagaatgagtaccagttgcaagctggagaccgtctgcagagatggagcctatatttcattctattaatctccctcttctaaattttcttacaggaagagaagtctccagcagccatggaggagctattctctaacactgcttagaaagtggatctgtgtggcccaagtggtagactgtgctcaccaggaaaacaagtactcagatctactgcttctgggaaatctgcataattgaccaatggcctcagtgctaccccactgttataaaatgcacaggagacaaggactagaaagagaaaccttcaacatatataagacatgtttttccttccagacatttgccaggttatgaagccacatgtggttaaaatctaataagctaaactcaaaatatgcaaaggctagaacttccaggaagatgtaacaaagatctgccaagtccagtgaagttgatacctcagtggtcgtgggctggacctgaaaggcagtgtgaaatattgagaggcatagtcctccttaaagcagaaccctgcagcatgtataccaaagtcacatcttcaaagctaatcgctgtgacctgttattgaaacagacattttactatgacattgaggtgacctctcatgcctttcacctgttaacacaggagtggacagatactcacaggaaataaataatgaactcagtagaaaaaaagacctatgaactgaaagagaatacaatagaaattatatttagtaaagcacaaagagaaaaatgagtaacaagaagagaactttctatatgatgcatatggaacacagtcaagtaaagactaagcagagcatcataacagcctatatgtggaaacttctctattcatttattacattacatttgtttgtatcctttaattgtacccttactttttatcctgtcagctttattctttctggccagtatcatttatgtaaaaattgataggtaggactggctgggcgcagtggctcacgtctgtaatgccaccactttgggaggccgaggcaggcggatcacctgaggtcaggagtttgagaccagcctggccacatggtgaaaccctgtctctactaaaaataaaaaaataataaaaataaaaaaaatagctgagcatggtggcgggtgcctgtaatcccagctacttgtgagactgagacaggagaatcgcttgaacctgggaggcggagtcgcagtgagccaagatcatgccactgttttccagcctgggagacaagagcaaaactccatctcaaaaaaaaaaaaaattaataggtaggactaaccagatgtatttctatcaatattatttttaatatttttctttttaatcaaaatttaaaagtaaaaatatgcatagggaaaatgagactagtatttatttattagctatttaatttctaccaactctattaaatcttttggaatgtcttaaagtataatttatattttagtttggataaagacatagctatatattaacatgaatatgaagttatatattgatttatattatatttcctataaaatcacataatacatagtaagaatgtataagatgatacaagtcaaatcatggatgcttggagatcttgtgatgaagcctgttcttcccttggtagctgggcatgatgtggcccatcttcatgctaggccagcattcccttgcttctgtatacctaatttctccttctcagatgcactcccaacaatgtatgcagaaagctaaaaaaatgaatgagtgtagttaataagatgctattgaaactgagccccaaatctagctctgagcacaatgatagctaaaacttaaggagaggcagatcaaatagatttcatcaccaaagcacagaagcatatttgttcaacaacagagctttgcatttacaaaagagaaaagagcatgtttggggtaatttattttgaaattgctctgtcaaaagctaatttcattttgttccatgaggccaatttggctcatatgtttgtgctttgataaaggcataggaataatattaaaattgttgcaactctacggagattataaaactttctcaaggcaaatttcttgtctctggaaagaaagaatggtgaataatgaatgacggaaatttgaaaatgaattcgttcaacaaacacttattgagtgaatgctgtgtgcccgatgcgttaagtctaaatcatctagtgctgcagtgagtgagccagggtgagaaaacaatgaaaagagcagacaggttgttattcaaaatgtctttttttttctccatgcaatgtttcaaatttggagagtcatagtttgttattgatccatcaaatattatgaactataagaccccaatatacagtggcttaaaaatagagatatatttacctctcacctaacataccagggcatttccaggttttatagtagcttaatcatgtcaggaaaccacacttctttcatcttctactcctctatccctataggcctttgcctatcatgtgaaaaagagtgttaaccagtgggaaaaataaaaaagaaaaaagggaagagtaattcatatcatttgaattaaataacctagaatttgcacacatcatttctgcttctatccttttaaccaaaataggaagttacggaacacctactgaaggagctgggcatagagttttgctgggtagccaggcaggttattcttcccacaaatgaaaaacactcatttttaatgcaataacacagggatctgtgttacagggtaacacgcagatctattcattcactatcgcaaggtaaatcccacaattttttttttttgataagtaattccactaggggtttttattttggttttttttttttttttttttttttttttttttttttggacagagtctcgcttttcactctgtcacccaggctggagtgcagtggcatgatctcggctcactgcaacctcgtcctcccaggttgaagcaattctctggcctcagcctcccgagtagctgggactacaggcacgtgcctccatgcccggctaattttttgtattttttttaagtagagacagggtttcatcgtgtttgccaggatggtctcaaactcctgacctcgtgatctgcccgccttggcctcccaaaatgctaggattacaggcgtgagccaccgcgcccggacaccagcaggtttttgactcatgggctaaatcaaatcctctccgatataaaatataatagagaataggaatatggtcactaccataatactctcatttggaaaatggaagaataagaaacaaacatcctcttttctaaagtaaattaatacatacatgtgaaaagtatctgctctgctactcaagagattttccttgatgaatatttatggcagttctgggtttcgctctcttgaacgtttttctctgcttagaaacttcttggccacatctgagattggactgagaaagaaaaattatgtccttaaaacctgcctaacatttacccaagtcattgtagtttgttgttcatttatttaggtaataatacacttgctgcaaaacacacagcaggttttaagttttcttgcttctaataagttttgtgtgaaaatgattaaacaaagattatatctttacatagttggtttgttttgttgtctgttaatctttgaaatcttgtttgttttctggtgtttactggccacagaacctgccatttctatcaatataatgacaactactttaaagcagggcctcaaaatgagagttagagatgagacaccactttggagggatagattagaaaaataaacttcgctggtgctgccgcgctcccccaggcattaacttagcgagtggatagtgcttttgtgagaagtagatgctcctatctctaggcacagccagcttcagtacatgttgaataaagctgaagcaatgtttcagccctagcctgctgccttcactggcagccttttaacagtgtagttcggctgtgcagactggacttgcattaaagcattctggtgcaataaacctgagtggttaacgaatgtccttaatttgatactcgcagttggactggcttccaaagtctagctgcagaggtagaaaaagcttgaggaagaatgttggcttctgatcatgctgcctctttagaagcaagccaactctacgtaataaaagttcttctctggtagatctttactaagcggaaaatatttcgtgctttttcaattatttctgctcaacaatcaagctatgttggtctaccttccagggatcactggcgacatttttgctatgacttaccaaaggtcatcaacttcagcaatagtagctgtgagtccttgttcagtcttttccctgttctgttagggtaacacattgttttggggtttttggttgttgtttttgtttgtttgttttttgctttgagatggagcctcactcttttgcccaggctcgagtgcagtggcgcgatctcggctcactgcaacctctgactcgcaggttcaagcgattctcctgcctcagcctcctgagtagcggggattacaggcatgcaccaccacaactggctatttttggcatttttagtagagatgaggtttggccatgttggtcaggctggtcttgaactcctggcctcaagcaatccacccacctcggcctccccaagtgctgggattacaggcatgagccatcgagcccgactgtttttggtctttgtccagcattttcctacatctttgtaccaaaatccttatggttagaatgcaggctaagctgcttgtataaaggaccacaaaacacagtgacttgaacagtatataaatttgtttcttttttatgtgacagtcacgttaggtggacaaaggcaagcaggaaaacttaatgttgttagagaggaagattatctgtagaatgggttgacaatccaccgggttaaggctaactcatcacactatgttgcagtctgtaacagggaaacgaaatgtgaagatacagctttttcctccttcctaaagacccttcccagaagttgcacacgtctcttctgcttcaatgcaagactagaaattatagtctgtagtatgtagtaagaatattaaaatattcttagtaataataaaaatggatagatgttgatgtaaccaacaccttcttttaatagagttttgaatgtttattttaaatatttataagaatacaactgaggaagctaaagggtagttcatttttaagttattttataggttatgttgccaggtattacattaataaagcatgtaacaaagcactaatgacactttttcttcaaagttattttcaaatagaattttgaggaaaaagaccatttttcattaagcatgtaaagacaaatatgtataaacaatgaatgatattcaacaaaatattatgcaaagacttgaatagaaatgaatgagatgatctgttggtagttgagtatctctaggcaaccttctttttatacctctcctgcatcatgccaccttttgtatccctccatcaaaagaagctgattatctgattaatgtcccataaattcgaagttgttattataaatgacctgaaatcaggcaaaaaatatatatagagacaaattatattaaacatactagcaatgaattatcttctgctatagttgaatgtaagtttaagaaaatattaaaacattcataacagaaaataaatctttaattcctcttgtttcataaaacacattttaagtgcttaaacttataattaagcatgtactttagccgcagagaaatattacaactacttgattataaaaaaacaaaattgtagttgtgttgcacttaaattctgaagctgattatttttatcggttacaatcagcaaataagctcaaaatgttttacaggagactgcaggttagtttcttctttgtctaaataagaaatgtctcaatgtcgaggtcaacttttaaatacttgactattggcactctcatgagtcaagtatggagtgaaagaagtgaacggtatcgttggtctgcattgtgaatatttaacaatacttttatttcacatttgattgctaatcatatttttaggttgaaagttcagttttaactctttagcgtaacataaattaggtgagttaatatagatagaagatttagagcagtgtctgatacaaaacattaaataaatatcagcttttctgtgtgtcttataaatgttgctctataagtgtttacggaatatatttagaatatttcatttaatttgtttctcataaaaagacagtatatctgtaatttttttcaatgaattattttcaatatcagtttcaattagtagcttgatatttgtcttacaaaaacccttcttgtttagtcaattcaaagagtgaagtctactttattaccactctacttcaactttactactggtgtcttttactttgccttacatacttatggaaccacactagtaagttgtgggtaattgcctgcttaaaatgtataaattaacttttcaaaagtcatctttatttgtgaagttcaggccagcataatcgttaattgcaaactttgaagccgattgtctcagttggccactccctaacaggtgaacagtgcttgtgtttacagggtgtctagagtagagttaacttactaatttttccatttatatccaacatatgtcaaccatatgctaatataatttctataatggctattttgggaaaagaaaatatataatacagaatataaaactgattacttaccaaaatctcataatcatcatcactttagagaagcgattggtttttgatttccagtatgcactcatctattactaaccaaatttcagtgaggacaattccaggcactgccttaattttttttaattaaaatcctcattttactggataccaaagaaaaggaaatatgttgatgtgtttagaagctttaaactaaaatacctacttaaatgagtatgtagaaaaatgttataaaagagagcatctgacttgaactactgcttcaatcaataatcaatttctgtaattactttaaatcattaaaacaaggaagaaaagacacaagcaactgtatgtattacacatttcaaagcaagatgtttagtaacagaaaataaccttgtagtactaaattcagattgataatttttgaaatgcatttatgaaacttacaaaatttaaaatctttgtaagaaaaataaccatgtaatgagtattaaaattatagtcatgatataagatagaatatttcatgctgaaggtggaaattttttttgttttgttttgttttgctttgagacagagtctcgctctgtctcccaggctggagtgcagtggcacaatcttggctcactgcaacctccgcctctcagattgaagcaattctcctgcctcagcctcccgagtagctgggattacaggcctgtgccaccacgcccggctaatttttgtatttttagtagaaacacggtttcaccgtgttggctaggctggtctcgaactcatgaactcaagtgaatccacccacctcagcctcccaaagcgctgggattacaggcatgagccgccgtgcctgacctgaaggtggaaaaattaccttttgggtacaatgttcactattcaggcgatgggtacgctagaagtccaaaccccgatactatccaatatatccatgtaacaaacctgcacatgttgcccatgaatctatgaaaataaaaaataaaaaaaatctaagactattttatgctattcttgtgtaggaggcagaataatagtcctaaaaaatactcacttcctaatcccccaaagtgtaaatatgttaccttacctgggatgagggactttgtagatgtgattaaattaaggttcttgaattggtgagattgtcctggattattcctgtgggttcagtataatcacaagtgtctttacacatgtaaatgagagacgggagagtcagaggaagacatgtgagcaccgaaacagattgcagagatgtggctgtgacctgggagccatgagccaaggagtgtcgtgcctttaaaagccggaaaaggcaatgacacagattctctcctagagtccccagaaggaatgcagccctgcggacacccacttcaagtctagtgagacccattttggacttttaacctccagaagtgtaagataataaagctgtgttgttttaagccagggagtatatggtaatttgttacagaagcattaggaatctacggtctctgacacatttacagaattcaagaagcctgaggtctaatttaagaaatactattaatcttttctctactcattttcttcaactgccaagtgagtattgtaatgccagtcttacatacctcacatcattatgtaaagataacattaatgtttaaaataacgcattactttttctatagtttaaatagcttgctcccataacgcattcactcaacaagtattaatggagttccatctagattctctcgaccctggggataaagcactgaacaaacattcacaacaaacattcacaacttcctgtgattatgaaatatatattctagtggtagggaagtgcataaacaataaatatgtagtgtgtcagatgatgattagtgcactggaggaaaagaaatgataaaaagacgtagaaaatggggagctttaatttaagctggagtcattctgaaaagtctcagtgatgggggaatttgtgtaaagacctcagtgaggtgagagagtgtgagtctcatgtatatttaggggtaggtgttccagtctcctcaaaggtcttctgactgacatgtgtctgaactatggggaggctaatgtgtgtggaaggaagttacagagggagcctcccatggcaggagatgaacgcagaagataagcaggagactaatggagttacaggagataattatgggcttcctttgtctttgttaggacttcagtttttactctgtgagagaatggatgtccttggggtattgagcagaagagtaacatgattggaaataagtttttaaaagatgctttctagctggtatggtaagaaatacctgaggttgggaggagacgaggtaaaagaagattgcaaaaatgcaggtcattgatcttgacggctacgaccaaggtggtattagtagaggtagtgagatgttgttcaattctaaatataatttggaggtagagattatgcaatttgctgatgcattggatgtaatatatcaaagaagaaaggagtcaaggatgttatcaaagcttccagactgcacagctgaattgagggtgttttccccagctcagatgggcaagactgaaggaaggatagttgggaatgagcaagtgttttgttttggataagttaagcatgaaatgcctgtcagctatccaggtgtggatgttttgatggcatttgcgtatgccagtctgggtttcatgaatagagtccaggctggaaatagaaatcctcctgcacaaattattgcacttattaattacaactttgtcagattttctaagtaaaatttaaatgcagtagtatctataatttttacagcaattttatgtcccactatttaagaggctggagccaatattgccataatgtgatattatgcaatgatactcaggtaaataaactctctgcaaaaaaaaaaaataatattaacctataattatttttgaaaatcattcatattggatttttcgaaaatgcatattgatttcaacattcaggtaaagtgaaacagaaagtgaaagacactcaagatatgaactacttacttattgtaatgaggatgctgattttgcatatttttataattaaactatacaaatcatctcattatttaaatacagattccttcttaaaatatgaagtccactttgttttatttacattatgtgaggctcataaaacactttggaaaactacttcttgagacacggcattaaagactaagtggcaaagtaaataaggattatatccctataattattctggatatattttttaaatctatcaaaaaagggaggagggtcatcattaattttttttaatttgcttttaacatatattgtctttttttattattatactttaagttctagggtacatgtgcacaatgtgcagatttattacatatgtatacatgtgccatgttggtgtgctgcacccattaactcatcatttgaattaggtatatctcctaatgctatccctcccccctccccccaccccacgacaggccccggtgtgtgatgttccccttcctgtgtccgagtgttctcattgttcaattcccacctatgagtgagaacatgcggtgtttggtttttttgtccttgcgataggttgcttagaatgacggtttccaaattcatccatgtccctacaaaggacatgaactcagccttttttatggctgcatagtattccatggtgtatatgtgccacattttcttaatccagtctatcattgatggacatttgggttggttccaagtctttgctattgtgaatagtgtcacaataagcatatgtgtgcatgtgtctttatagcagcatgatttataatcctttgggtatatacccagtaatgggatggctgagtcaaatggtatttctagtgctagatccctgaggaatcaccacactgtcttccacaatggttgaactagtttacagtcccaccaacagtgtaaaagtgttcctatttctccacaccctctccagtacctgttgtttcctgactttttaatgatcgccattctaactggtgtgagatggtatctcattgtggttttgatttgcgtttctctgatggccagtgatgatgagcttattgtcttacaagaagaagaatgaatttcagtatgtttcctttgttaccatagctgctataattcacagaacaaaatttaatgtgcaaccaaatagagaaagtttcaaagagaaagagaaggcctgtggcctatggcccaaaagtcaagcttgagagaaagctactggaaagtattggagtgaaatactgagagccaagctatagatattacctctttaatcttctgttgaaaatcttcagtaaaatctatatttttctctagtgatttgtggattccctctctttttttggtgggtgttggagatgtcttattggtgaaggagaaagcaatgaagtgttaagtcttgcttcatggagcagaaatagaggctgctcttgaaagacgggagatacaagatttgtacttgcgtaagagataataataataataatataattaggaacattgccatgttggaaggtataaattgagaatgaatagaaagggaaattaaccctggtttcacatgtcatgttaattctggagaaaatgatgtctaaactagagttagaattagttttgatggagttcagaaaaagctgaagatgtgaaatgtttcaggagaaagcaattacatgtgaaaagacctaggggcaaaagttaaagtagcaggtctaggagcctagagtgagatggaagaagtaggaactagataccccggagaggcacttaaggatagtgttgtaaacagccttgtcagattcataagggagttgttctttagcctgagagcaatgaagagcccagcgaagccgatactttaattacaatgtgcaaacttttggcaacaaaatggagaatgaagcagacagtctgtgctttcattaagtttaagttccctgggtgcaaaaggcattgaactcttaaccatacagataaaataataatgcaatggcagccccacctccttttgacagatctaaagaatatgtccagagtgactatggggataccaatcctcatttaccttacaagtttgtctttaatgcagagtctcagcaaagaagtttcagagagattagattacaactcaaaaagtaagctgtaatgctctgacagacaatgaattggaatagcgatgcctagtttcaggaagacagaagaggactaccatactttactgagcaattactggtggaatttccacatttcttagtctacttatattgtttaatcatagtaagtgcacatttttattcctttattaatctacttcactaatatatttaagtacctactcattagtagaaactgagctaactggagagagaaaatagtaagcaaattcaatccatgctttcatgaaacaaactcccttagatgcagataaaaattactattttttatcaataacatggaaaaagttatactgcactatatctttatgatataaaaaagaataaaatgaccaatgaaagcataataaagcataatttcatctattctttttttaaaaaaatgcagggtctcactctgtagctcagactggaatgtagtggaatgaccatagctgactgcatccttcaacttctgggttgaagtgatcctcccgcctcagcctccagaatagctgagactgtaggtgtgcaccaccacacctgcttctaaatttttttaatttatgaaattttaaaagtaccaagagatcttttatatctcagtaaggcatagctctgagtgataaaatattaacatatcaatggaagttcctaactttccaaatataagccttttaactccagataactgttaggtcacttttgataaggaagttgtctgttttcttatgtaagttcacagtttttttatttttttttacactctttacttttattttttttagcctttaactctcagggaagcaatagatatactttaacacaaactataacaattgtttatttttatactacagaaaatggatagatgctattctgaattgttctagtttgtcactatatgttagattttaaaatgtttcaacatttttttctagttatatttaaacttagattttacactaaaattttcagatatgctactaaaatatcaagaaaactataattaatggaaatcttccataggcagagagacattaatgttcacaaaatgtttttggtctctatattagtcactttatttgcaagagggaatcaaaaagaatgacctctgcacgtatatgtagaaaaactctgaccaacagtctttacttaaatatggcaccgaatcaggaagatgctttattatagcaccacttctccttctctaaaaggaaatcaacagagaatggaggttctaagagaacatccctatcagtcggctgtcccttcttaaatatcaatgtaatataattagagtttttaattattattcttacattagtttatttttaactcaaataattaaatcactcaaatcgctgaatagtgaataatgatacacatttatatttaagaggggattcattatcccaagatgatgcattatttttagtttaaaaataactatttaattgtatggaacaatcagttaagttttgtcattttggaggattcagaatttgcattattttctgaacagcagactgataggaatgttctcttagaacctctattctctgttgattttttcttttggagaagggggaagaagtgctgtaataaaacaccttcctgattcagtgcgatatataaataaagaccgttggtcagaattttcctacatgcatgtgcagaggccaatcattcttctagggtttaaacaatgtttgaaatacatattattgggccacaaaacaggtactcaattatgctggatttcaaattttttctatgtccagcaggtaaaagcaactaattaaaattattgaacctagttctactggagttaattttcatggggaagcacaaagtcagaatcaaaagaccaatttcttgctgcttctcagatagctgaatgatcaacagtaaacaagtggaatttctaagatttatggtcctgtatctacctcattcatcttggctcttattgtttttactcatgccttcctacatttttctctttgtgcctggtgttctttgcatgaaatttattttccaatataaagctgttagtcgacatgctagtatgattaggaaatagagttatattgctcccgttgtcagagacacagttgcactggagagcaccccatcaattcatatgatcagtcagtttaaagcaaatctgaataacaactacggagtccagtgaagtacagaataatgatggtttgccttattttacttctttcttatttgactttgttttcttgttgttcgagtgtctcttggataccaaattaaaaatacaaagaaagtaagtaattacttggcaggaaggaagttaaaaaaagttgaatataggtgttttctctatatacatactgtttatcagcaagctgaatttgtttattttatcctcttacctatttcttttgactaatctggatttattatagtaacttatctccttagatgactttaaagaaatctctttgtgtactttactcagtggggtactttgacaaaatgtaccaattaggcttatgtgagatgtcaagtgagaagaatgagtaagaaaaattgatctcaagtgaatgaacacattttattcagagtgattttaaaatgtgagcaaaaacaccacaatacatgataaaattaaccaccagctgaatttgaattatgttctttataggatgcatcctgaaacttcatagtattaatgcaaaggaaacaaaagctgtggaaaatgatattcaacattgaacatcagaaaaaacaataataattttttatttatatttatcaatattattgtttattgtatggacaggcttacagactgcagttgacaggggctagagctaaaattcagggcaccttctggaactgcaatgggacagagccagcatgcctttcggactgtctctcccatgagttacctacacgggtcgggtacgtctgaggctgcagcagagaagggttgaggctgagacagggtcccatcaggatctgctttatgatggatgccagcaagcccgtccagttggtgctcatgggcatatttctcagcatctctctgtgccatcaggattgttcccaggctgcactataaagaggctagagttgagcttcaggaccacttaatctgctgtaggatagaggctggtaatcctgtcatggtggcacagatgggagagtctcccaactgtttcctgcacagggaagatttctccctgtctgcagccaaaaggaactggagctgaaacagggtcccttcaggatacgccatggaatgaaagctggcaagcatatccaggtgactcagacaggtgtctctcaactggtggctatgaggcaatattttaagacaaccagtataattttcggcaaatgcaatctggcatttaaatatatttatcaacaattctgaaaagactaaatatgctgtaatttcaagtgctcatttagttgatgaatcattaagaagttatatggattaaatgtagactgttgattgatatcatttatagtgagatagtagttgtggtgataaacaaaaatattctaaaattcttatggaaaattaaatgtccagaagactaaaaggtactccgaaagggagaaaaaaatgggaacttgccataaatcgtagaaaatatgaaatataatatatttattaatgtactgataaattttagtcaatattattacataaatagaatgtaataaaccattttttcaatattgaattataactttttaatattgaagtacaatgtttccacttgactggtaaatagtcgttcattacaaatgtaaccagtactactatatttgaaagagttattatttttgttaaaataaaataaagtataattacactcaggaagataaaatattgtgattttaaaagtcagagactgcctttacatgattaacatgattaactatattttgtttttttgtttacattggtcagaatgttgtgttattaatgcctttttgaatgctaatacctaacctctgaaattaaaaaaaaaagctaaaatatttcagattaaatatgtagatccaagttataaacagctaaattcttacctagtatctgaaaaagatgagaaacaattattttttcctaataataagactaactttcagccaggcacggtggcccatgcctataatcccagcactttgggaggccaaggtggatatatcacctgaggtcaggagttcaataccagcctcgccaacatggtgaaaccccgtctctactaaaaatacaaaaattagctgggcgtggtggcacatgcctgtaatcccagctactctggagactgaggcaagagaattgcttgaatctgggagatggagtttacagtgagctgagatcatgccactgtactccagcctgggcgacagagcaagactccgtctcaaaaaaaaagaaagaaagaaagaaagaaacacaaaaaaactaacgtttgattggatttccccttatgtatagagaacaaagcaatgatagtaacttcatatcatcatagatcccactgtaatacaataatttgctaacaaagaaacagtttcaatgaagtgtagtgtttacaaactacattacagcctacaaattatgtaaatgattgttacccttcttattatttaaatgcataaagatttttcttcttcaaatactgtcagcttcacagtgaaaataatttttgctcagctgctctgacagtcttctaatggaaattttaagtggaccacgtctatctgctgcatgatctatgaataaactaaatataggtctttaaagagccttgtggcgttgattgctttgacacatcctgcatttgctcactctccattgtttaatttttcactaagaagagaagaaacaagtactctgtccttgaatagaattagctatagagaacagagtgagaatatacttgagatgacagaaactaaacaaatgctttgtagcagccataaaggacttgagaaataaggtctttaaaagagtaaaattcaatgtgcctgtaccttaaaagataatttcaaaaccgtatataagagaaatatttaacactttcaacctatcagaaattttaaatgtatttgttctttggaaaaatatttagtgtggccaggtacggtggctcattcctgtaatcccagcatattgggaggcctaagcaattggatcacctgaggtcatgagctcaagaccagcccggccaacatggtgaaagtccattcctactaaaaatacaaaaaaaattagccgggcttagtggcaggtacctgtaatcccagctactcgggaggctgaggcaagagaaccgcttgaacctgggagtcagaggtttcagtgagccgagaccatgccattgcactccagcctaggcaacaagagcaaaaccctgtctcaaaaaaggaaaaaaaaaaaaaaaggtaaggaaaaaaaagaaaaatatttagtgaggcctccaacatgccagatagtagtctaggagttgctattaaggtggtaataggacagaaaagcactctaatttctggaggtgatttctccaggggcttgtacggcaataggtttttcaagaaggtgtttgtggaaaactaatatctgggaaagaagaaacataaatagataagtaagcaatcagtattcaagaagctaacatttgaatcttataagaaaatggagaggttttaatatgaactaggtattgattatgctatatgtattgaggggtggaaactggattagattaactgcccttatcagtggcaagtataaagtttgcaaaagaataaatcttatgtttacaatcctcctgagcaaaagcagttaaagtgtataagattaaattatgttgatagctatcagaataatatgctatatttaagtaagtccttgaaggcaatagctatatttatcatatctttactatgtaaaatatgtaatgtaaaaattgtcaaacaaaaaactgcatgtccataacaaagaaaagtatgcttatgagttccacaattgttactgattaaccttaataaagaaacaaacgaacaaacaaactcaaataaaagaagctattgaccaaggagagcaagaacaatttctcacatgtagacagacattcattacttctaataatgctttatctacacttcagaagtatttggataataattttactgtattttcgcagccataggatagaggtaggtgtctgactgtgcatgtatttgtgtatgtgtatatatgtaatttctatcactgttgacctctaaaattaaagggcagagttcaagagaaagaattaattattttttgagaaaaatggaagctggttcattgctgtttcttatatggaaaataataaagaaagcataaatggctaatgaaaaatgaatactatttacatcagaaatagcaactaatcagtttagggtgatggcttacaatattgctgattatgtaaatgtggaaaatcaatgacctagtgaaaaatttaaatataaaaacggagtcaataagaggaaaaaaagaggtatataatttgtggaaatatttcataaggaaatggacatttctgaaatgtggactctgtgatgagagaaagaatatttgatattattggacaatttatctgttttcaaaaattgctcacaaagcacttttcaattgagttgttcactaaggctgcaactatttaacaaataaattaatgggttaataagtgacccctacgtaatgatttctcagaaattattttctttctttctctttttttttagacagagtttctctctgtcacccaggctggagtgcagtggcacaatctcggctcactgcaacctccacctcccgggttcaagtgattctcctgtctcagcctcctgagtagctgggactacaggcacgcaccgccacgcccagctaattttttgtatttttagtagagacagggtttcaccatgttggccaggatggtctcgatctcctgacctcgtgatccacccacctcggcctctgaaagtgctgggattacaggtgtgagtcacctcacccagccagaaataattattttcaatgctattctcaacaattacctaaaagctattatttattttgattcaattagccaaatcatattcctctatttcacctaggatttatataaaagttaagtgtttgtaagaattaaagaatatcatgaacaggtcattatttgaagaaggatttcttcattaaaattgattacctttaaaaacaaaattattgtaaggttagaaattctaatcaaacaactcattgcacgtttataatgagaagctaagcttatctaatttatcacatagtatacatatatgtacatacagttatatttatgcgtgcttatgcatatattatatataaataaataatgtatatattatttcattcaggctgcaataacaaaataccatatattgggtaatctgtaaacaatagagatgtatttctcacaattctggaggctagtaatccaagatcaacgtagcaacaaatttgatatggggtgaggacccatttccttgttcatatgttctcacgggacaaacaagctcacttgtgcctattttataaggacactaattgcattatgaaggcccaccctcatgacctaatcacatgtaaaaaggccctgatacctgataccttcaccttgggggctaggactacaatgtatgaatttaggaggtatataaacatcccaatcacagcacatgaatactcacagacgtacacacacattattataaacgcagatatatatatatatatatatcttatttattacatcaactgtactttaacacatgtgcttttcatgtagaatatattgtgctttctctaaaggagttttaaaaaagggtgataaattaaagtaccaagtttgaagaaaaggaaagataagaaataggccatagactataaactccttttcattcattatgcttcataaattatttaattgtatatttggaatatatgaaaggacattttaaattttgtgtagtgcatgaagtaaaaataaaaatgagaaatacctgcataccccactatttaaaataattacaatattacaagcattttagagaaacctgtggcttcttccagatccaattaccttctcttcctcacataggcataatgaatgttctattttaaaaagtttatctttcttgtactttcatctgcagtttttcttccttttggatttttatgaatagaattaaactgcacggtgttttgacttgcctgcattctcaactttatgttcctgagaatcatctatgtggtcatataaactgtagatcattcatttttcatggatgaaattcattttatgaacaagctacaatttaatttcttgctaattttgatgggcatgtgggtggtttccagtgtggaggggttacaaataatgctactctgaggctttttgcatatgtgtcttgatgcagatatgcaagaagatatctaggaatgaaattgtttgcttcgagtctaaagagaaaaagtagaaccaattttgagcatttaaaccacagggagtaaaatgcagaaaatgttttacatgtataagaagctaccagagggcagtgaagccagaagaggataacaaagcaggaagcccctgctaccctttggaaaagtgacagatgggaagacgggtttccagatgcttggtgctggttactgtttgctgaagcaggaatgaattctgccctgtcttccccttgaaatgttttcctctgtttcccatggatgtaactgagcaggaaagcatctgactttgggacacgggatgcactgtttttaagtaacaaactccatatgatacagagtagagcagcaaaagggtgaggaataaatcagatgaaaaataggcttagtaccagcaagtgttgaggtagttgtattatttcaaatacttgtctaaaatggttttactatttaaatttccacaaatagtgtaaaagcatttgtttttagttcatatgcacagtaatatttaaaaatgtcatttaattgtgtgtcagtcttatgtacataaatatctcattgcgtttcagtgcctttatgcagttactaataaggatagaaattttctgtagtttttgaccatcttttctcattgcgagctattctgcttttgaccattgtcctgttgtttttgttttgttaattattttaacaatttctttatagattctggatattatttattgtttagttatacatgctgtatctttttcaatggccttaaattccaacttccattttgtgtctttcaataaaaagatattcctaattatgtggtttattttttatcgttgtttattatttgtgtgtgttttgtttcttgcttaagaaacctgttactctttgttagtcatgaaaatactcttctttattatcttttaaagttttgtagtttcatgatttccaattaagccttaaatagctgatatttatttgctatgtgatgtgaggggatacattttctttcactgtgtagttagctgtgctaggcctatttattgaaaactgtgattatctacaatagaagctatatcataaagcatattcccacatatgaactgctgggttttctactctgtttcttatatcaatttatatatctcttgtccagcctcataattaccattgcttacattaccatgttattgtaactgtgttctctttataaaaattattgatatgtggaaagcaaaatcaactttattagtgaatttatgattctgagtcttttgtacttaatatacattactttcaatggcaaaacagcaatttacttttgcaccaacctaatagaaccagtttgtctaattccattaacatttcaatacaagttttaattgaaaataaatggatctatactatctagagagatttaggagagattgctattcttacggtattgattaatctcttccattaacatgtacatctctttcgtgtttgtctgcttaaatatgttacactcctcttaaaaatgtttttgcagttaggcgtgatggctcatgcaataccagcactttgggaggctgaaactagagcttcacttgaactcaggagttcaagaccagcctaggcaacatagcgagacctagctctacaaaacaattaaaaaaaagtagccatgcatggtggcatgtgcctgtagtcaaaggaagtcgggaggctaagatagaaggattgcttgagcccagttgttcaacgctacagtgagccatgattgctccattgcacttcagcctgggcagcagagtaagacagagcaagactctgtctccacatccccccaaaatttgcataattattgaatataatagatatgatttatttattaaaagtctatctgttaccaaatcatgttatctgtttgtggctcatgtcaatgacaaaatagcaaatttaattttttaaaacactgaaattgcaataattgtatgtatacagatcaccatttttttcactaagtaaattctccaggtagaatcagcatacagatcaaggattaaacataagcagctcccaaaaggaattcattgcccgtttcctaaatctagtcccaagggttagcattaacataacttctaacaccatggaataattttgcctttttgagggaagtatatgtaaaatgaagcaacagcgcctttgtatctattttgttcgacataatgtttctaagattcctttatgttttcatgtaagaatagtctactcattttcattgctgagttactttatagtccttcataattgccatacaattgtgacccaatttatgtatcttttccaatgctgatggatactggtgttgtttccaggtttgtgcatttcaaacagtgctgttatgtacattcagatacttatgtggtgaacatagatacacctttctgttgggcatgttcctactggtagaattactgggccaaaagatctacagtctcagtagtatgtgctgaaaagttttcagaattgatataataatttatagatccccctgcaacatataagaacgttccatgcactcactaacatttcgtaatgtcaggaccttttttttactgttgttattttcttatgtgttaatttcttatatgttattctcttatttctcatattttcttacatagtagtatcattttttaattttaatttgcctgatggctaataaaacttagcacattctcatgtgttctagtccatataggtaccctctttaggaatatcccaattctatattctatgtttggaagaaatttaaaaaagaaaatcaatgaacaacaaaacaattttttcttcatctcaaaaaactaactttggtaaatgaactaatatccttgaaaagaatatatacttgtgattatttagtgcaatgatctttctctttctcatttcagattattgctataattaactgatttagtccatttgttctgtcaaaaatcatgtacagttttttaacatctacaactatgtttacggttattagtctacttttagttctgtcaattttgctttatatatgaagctctaatttcaggtacatgcagcttttatatttttttctttgtacaaatttatggggtacctgtgcaattttgctacatacagagattgcatagtgataaaagtcagggcttttagggtatccatcatttgaataatgcacattgtacccattaaccatgtcttcctgatgaattgacccttttctcattccatgtgccccttttaacaatttatagtaatatatcatgtctttaaattggcttattatgtattttctgtttaacccatcttttttactttttgtgttaattaattacaaattaattcattaatttattttctattaacttgttaagtagttattttcttattatatagttaatggtacactaaagattaaaataaacatatattagcattccatggaaaactttttacattttccattctttcataaatgctaggaatctggaagtatctaactccaggtatctcctttccatctttgtattattatcacgcatttcaatactatacatactttaaaatcaaatactattaacagccaatattcatttatgcataccaagacacttaacatctctcttgctttttattacttccaacaattttgagtttatctttttttttcctgcctgcctgtctactggtgacgaattatttttgttttgtttatccaaatatgtcattatgttacttctctttttgaagtgtattatttgctggatgtagaatttaattgatagcaaccgtatttttggtactttaaaaatattattatattttcttatggatttaatagcttctttttacatattaacagaagtcttatttttgctttttctaggtattatatttcttttattcctctaatgctacttttgagatttttctctttgtatatattgtcgagcaatattaatcgaggtaaaatttttttttatttatcaagtttaggtttctctgacattgtggaatttgtgagtgtatgtattttatcagtttagaacattcttggtttttaactctttaaacatttctacttcaatttttctttccaggtctctcagatttcaataatttgtgtgtcacatcttgaagcttctgttcctttttcactctttattctcactatgctttaagctaacacaggtattctatttatctgttttgccattcatgtaattacatttttattctaggatttccatttcccctatgatatcctgaaaaatttaacctttgcctttttttcttcacttttccagtattttctttagcacactatttatttttactttaaattctttgtttgataacaacatatagatatctctaatgatgtggatctgtttattttggatatttttctgtacgttgaagtttattagattctgtctcttggtatgccataaatgatggaataatgtaatgtatccatcatagaatgtggaatgatgcacctgctgtgtaacatatagtacaagtcacagatggcaatttcttccttcaaatagggtttaacagttcatcttctaagaagattaaatagtggggtagcagagagtcctgcttgctttattccagtcaggtactgagccaagttggttctgcattatagcttaatgtgctagctagttctggtttgtccctgcaggccttccagttgagagtttgatttttcctctaagggcccgcattctccagtagacagaactgtaatgttttctccttagaaagacaagattgcaaaggacccctgattttattatttatttatttttgaagacagagttttgcgcttgttaccttgttacccaggctggagtgcagtggtgtgatctcggctcactgcaacctctgccttctgggtttaagcgattcttctgcctcagccagcaaagtagctgcgcttacagactcacgccaccaggcccagataacttttgtatttttagtagagatggggtttcaccatgttgttcaggctggtctcgaactcctgacctcaggtcatccaccaccacccctccggcctcctaaagtgctgagattacaggcgtaagtcaccatgccaggcacaagtcaccgtgccaggcgcacctctgaattttatatatctaatttacatccaaaaatcttaataattctcattgattctaacagtttatttatagattttgggagagctttacctatagttagtaatatttcctctgaaagtaaaaaaatttctgtttgtttttccttccacccttttattaaacttatttctatttatttgtcttggagtacttgccagaaacactctctttttaaattttattataattgtattgtcctgagtttttataaattaaaataacttacttttaaattttcaatgaaatatatattgttttctgtaggtttttggagattccctttacttgcttaaggatattctatgttaactaagaatgttaaaatcaatcacctgcatctacctaggtgaacatataaattttctcttttaagtagtttaaatagtgaattaattatttctctcatgctaacctagtttttctagaaaaaactcaccatcattacatgtttctcatatatatatatgaatatagtttcaggttctatgtgctgatataaaatttttacatttatattcacaagtgattctggcctacattttatgttattttttgtctttgtgacaactttgttctccagtaatttttaaattaggttttcaaagacaagaaagttgaaagaattttacagtgaaggtaaaataagtgccacctagattctacgagtaacatttaatatatttgtttgaacatgtgactgtccatctatctatccgtttatcagatgtgtttttaaagcatctcagggcatactgaagacataaatacacttcctcacaaatctgtcagcatagatgctgatgttgacaagagttcaattttgttttatggttttttgtttctgaaaatgtatatggaataaaatgcaaagtttttaggtaataattcaatgagttaaaaaaatgcttattgttgggcatcccaaacacttatgatgtgcagaatatcatcattccggaaggttttcacattccactgtctgaaacacgtcactcacccccaccatcaggcaacaattgttcccaccataaaccagtattgtccattttaccacttcatatgaatagaatcatatactgtgtactctttcagtcacattcatgtttttcatactcattcattttgcatgcaacagaagtacatttatgtttcttgctgagtagttttccaatgtgcgattttttttttcctgttgatgaaactttgggttgttccaggtttttgaacattccatacaagactacttataaacttacactcacgggcatggtgttttgggaacatatgagtatatgtttggtttataaaacactgccagccaattttcaaaagaagttgtacaattgtacactccagcaacagagtatgaggattagttactgcatatccttgacaatattttggtatagtcggtctctttaattttagatggtctggtaagtgtagtggcatggcactgtagttttaacttacatttccctgataatgagttcttttcatgtatttattagttacatgtgtatattcttttatgaaatatctgctcaaataatttgctcatttgtaatgggttatttgacttttaaatattgaggtgtagggttttgttgtatgtggttgtttgtctcatttgacagattccaactttttaaaaagtttttgaatgttgcacctgctgggtaagagtgtgtgtgtgtgtgtgtgtgtgtgtgtgtgtgtgtatgtgtgcgttctatttataatacttgagtttaatagaacgtcttgaatttatatgtttgtctttttaacaaattaagaccatagtcagtcagtcattattttcccaaaatatttgctgctgtactattttcagactttccacttgctctactcctcctaaggaaaacattacagatatgttagtcctattgatattatgctacaagtgcctgagtctgctccattaaaaagaattagttttaccattttttagattgtataatttctatgaatctacttaattttttaatatttattctttggttaagcctagttagtgattttttttaattttttcaggtattatgtttttcattattgaatattcatttgcttcattatgcttagatatcctttttattgattacaataatgttttctcttatttcttaattataatagctactgtaaaattcttgtcctgtaattccaacatctaggtcagcctgtgtggttagtctttattaatcatctccccttgtcagtatgaattatgtttttctgtttcttcttgtaaattaattttaaccttttctggctcatgaatgattcaaaggatcttttttgatggctacactttctttttaggaatatatatatatttagaaaaatatatattttatatatattatatataagaatatatataggtatatgtattagtacaaatatcagtttcgtcttcaatttttcagggaatgtcttatatttttggtgagaaagaggtttcattatttataacctataaaagcactgtaatcactccttttaaaatattaccacagcttcttatccagcagactaccctcttggagagtgttctatcaaaactccttgatgccagctgacatgctctcatccatatggcccacagaacacacaaacaacttgtcacataatcctgagagtatcgacatgggctgtttcatctagctcttcatattcattatttcacacggggtgagtaaaaatcagcaaatcaactccattgattatggatggccttaaattctagagtatgcctgttgggttttccagagaaggaaataatccctgcttgctctactctagctgtactttagtaacatactttttttaagcgtagaacactcctacgtgaagatactcctaatattcaacagaaaagcaacagcttaccttttgactatagtaaaagacatttaagtgatcttattttgatttttgtttttaaaaatgtagtaaaacattcgtaacataaaatttgctatcttaaccatttttaaccttcttaaccatttttaactgtacagttcaatagtattaattcattcacattgttgagaaacagatcactagaacgtctgtgtcttgcaaatctgaaactctataccaatgaaacaactccccattgcccctcccttgctcctggtaaccattattgtactttctgcttctaagaatttgactactttagttgctaattgtaattaagaatttgaatacttcagtttctaattgtaattttaatgtataattgcaattaaacattatcttttataaaagactttattttagagcagttttaggtttacagaaaaattgaacagaagttaggaaaatttttcatgtactccctgcctccacacatacatagatttctccattataacattctcaaccagaatagaacaataattacaatgctgagcctacactgacacatcattaacacttaaagtccatagtttacattggagttcactcttggtgttttacattcggtgggtttggaccaaagtataatgacatgcattcactattctagtttcagagtatagtgtcactactccaaaattcctatgtgctctgcctactcgtaacatgcttcccactaacctctagaaaccatgatatttttattgtctttatagttttgccttggccagaatatcatttagttagaatcttagcatcatagaacatttagtctttcagattgccttctttcacttagcactcatttaagtttctccatatcttttcaggacttgatagctcatttctttttaacactgaatagtgttcagttttctagatgcaccctagtttatctgtccatttacctcactgaaagacaccttggaagcttctagattctgcagtatgaataaagctgctataaacatctgtatgcaggtttttgagtggacataacttttcaatttccttcaggaaatggcacaactgctggattatatggtaggtgtatgttcagatttttaagaaccccaaggctgtcttccaaagtggctgtacaatttgctttcccaacataaatgaatgatagtacttgttgcttgacatttttgtcagcatttattgttgtcaatgttctaaatttcatccactctacagatgattagtggtatctcattgttgttttaatttgcatttccctgatgatataagatgtagtgtatcttttcagatactaatttaccatctgttcatgttctttgaggaagtgtccataatgatctttggcccattttttttttaattgggttgtttgtcctcttattggttagtcttaagagttctttgcatcttttggataacagtattttatcagatatgtcttttgtgaacattttctaccagtatgtgactagccttttcattcttttgatgatgtctttctcaaagcagaagttttaagaattttaatgaagcctagcttatcagttatttcttttatggatcccatcttagtgttacatctacaaagtcattgccaagccctagctcattctagattctcctatgttatcgtctattatttttatagttttgggttttagatttaggtctgtgatacataatggatgaactttggtgagggatgtaaagtcagtgtctatattcatactttgcatgtggatgaccagttgtttcagcaccatttgtctaaagattatccttttactatttttattgtctttgctccattgtcaaagatgagttgactatatctgtctggatctatttctgggatttccattctgtttcatttgtctatgtgtccattctttcaccagtacagcactatcttgattatggtagctttatggtaaaacttgaagttgagtaatatcagtccttcaacttgtccttctccttcaatattgtgttagctattttaggtcttttgcctcattatataaacattaaagttagtttgtcaatatttgcaaaataacgtcttgagattttgcttgagattgcattgtatctatcaattgagtaggaaagaacaggtatcttcacaatattgagtctttctatctgtgaatgtggaatacctttccatttactatgttctttgacttctctcattagaatgttgtagtttttctcatatagattttgtatagttttattagatttatgcaaaagtattcccttttgggggttgccaatataagaagtatttttttaaactgtcagattctatttgttcactgctagtacgtgggaatcaattgacttttgcacattaatcttgtatcctgcaaacttgctcaaatcttttattaattccaggaacacttttatccagtcttttaggttttctacatagactatcatgttatctgcaaacaaggacaatttatttttttccttcccaatcagtgtaacttttactgctttttcttgtcttattgcattaatagggcttgtagtacagtgctgaaaagctttggtcagagagaacattctcaccttgcttctgatcttagtaggaaagatccaaatttctctctattaagtatgatgtttgctgtaatttttttttgtagatcttatttttcaagttaaggatgctcttttcttttttgtttatgtatttattttttattttaatttttgtgggtacatagtagatgtatatatttatggggtacatgagatattttgatacaggcatgcaatgtgaaatagacgcatcatgaagaatggggtatccatcccctcaagcatttatcctttgaattacaagcaatctattgcaccctttacgttattttaaagtgtgtaattattattgactaaagtcaccttattgtgctatcaaataataagacttattcattctttccacttttgtaccccttaaccatccccatccccccaagctcccaatacccttcccagtctctggtacacatccttttacttctatattgatgagttcaattgttttgatttttagatccccttctatttctagtttactgaaagttttttatcatggatgagtgtaagattttgtcaaatgctatttcttcatctatttatatgattttataatttttctttcttagcctgttaatatgattgactacattaattaacttttttgaatgttgagtaactagccttgtatatatggaataaatcacactggggtcatggcacataattattttcatacattgctggattctatttgctaatattttgtcaaaaatttttgcatctatgctcataaaagtcatcacctatacttttattttattttaatatcagtctggttttggtattagggtgatgctggcctcataagatgacttaggaagttttccctgtgaagcaattcattgtgcattgatggccaacatgtctgagtctggtgagataaaacatccacccacacaacaaattacatgaagaggatttattatttacagataagcagcaaaggacaatagaactttttgaaaatattagatttgtttgacagatgcttaaagctctgctcggcaagaatttgaacaattcactcatatttgctccccacaaacttgtaactagaagttggtactgtctgcccatttccctaaaacagaagcaaacactttcctgtcacaataaaattacgtttttatccaactgtttttctttagaaacagctttacttttgctcaacttatttatttccattttagtacatgggagcataagtttattccatgtattctaaaaaaaaaatgtagagaaaaggaagaagctacataaatttttcatgcgaatttctcaaagattacatacatgtttaaatgaaaatgtagaaaataggccggaggtggtggttcacggctgaaatcccagcactttgggaggtggaggcaggcagatcacctgaggtcaggaattcaaaaccagcctagccaacatggtgcaactctgcttaatgcaaatacaaaaattagccgggtatggtagcacacacctgtaatcccagctacttgggaggctgaggcaggagaatcgcttgaacagggaggcagaggttgcagtgagccaagatcgtgccacagcactccagcctgggtgacagagtgagacgttgtcacaaaagagaaagagaaagaaagaaggaaagaagaaagaaagaaagaaagaaaagaaagaaagaaggaaggaaggaaggaaggaaggaaggaaggaaggaaggaaggaaggaaagaaagaaagaaagaaagaaagaaagaaagaaagaaagaaagaaagaaagaaagaaagaaagaaagaaagaaaatgtagaaaatagataaattacataaatgttagtaaatggaaattttggttaggcacagataaacttcaacaataaggccaggggcatattgccatttaaaaaaaataaagttgagatatgattatgtttagtggtgaagttattactgaatccaacagcactcagtgattaaactcaacttgtttatgaaaacaaaggaattttaatctttctttgatttattgagaaatactcattggcaaacatcctttctgaatcaccccagtgtacccactcacacacacacaaaattactattatatcatctaattgagcaatttttttttttttttttgagacggagttttgctcttgtcacctaggctggagtgcagtggtgcaatctcggctcactgcgacctccgcctcccaggttcaagtgattctcctgcttcagcctccagagtagcggggattacaggcatgtgccatcacgcctggctaaatttgcatttttagtagagacagggtttctccacgttggtcaggctagtctcgaactcccgacctcaggtgatccgcccacgtcggcctcccaaagtgccaggattacaggcgcgagccgccatgccgggccaaattgagcaatcttaaagagaactcaccagggagtttcacagcagcttttagtcaagtattggcagagagctttgctgaggcctgtttcaggatggccatttttgcatgaggttttagttgttttttttttagacctctctaatcttagattgttttggatgttaattcagtacaaattttttctcatcagagatagtcacttttttgacaacatagaatttgacacagtaatattataatatgaaatattttcctcttcttgttctattccaaaagtatcatcttgtcaaagactgcataaagcctctctattatgttaaaaatacttttcccatgaagtttaaagaaattttctcccttttgaaaatgtgttgggatttttggtcctcagggatttgaggcctttctatctgcctttgttaaatgactttttactctgaaaatgacttgtaatgtaaaagttaaaaattgggaaagagttaccacatagttttatgcacccaggaaaattttaaagacaataagaaaagcttttgctgtagcatagtgtctattacatgtacagggcataagagcttgaggtgtttgttcaaaatttggacatactgtcagaatgaagaggattatttgttaacatataatagtttgacatctggtataaaaataatagtgtcttatttctttagatgaatgtactaaattgtaaattaagagtataaggagaaaaaaataataacaattatatgttcatgcaaattagcatagaaattaatgaaaaggatagaagatacagactcatttcaaagcatgctctcactggtaaaaacgttgatggtgcctatgtaaaacaaaatttcctctgtattgtcaagtttactaagaaatacaaaacagtgatgagaaatttgtaaaagcataaaatacaaaatcatgaaaagaataatgatgggagataaataaatattctctcccttctcaagagaatggatggtttacaaagaaaagtttaatagcttgctcttgcaaaactttttaattctaatgctgggatgatcttatgttcagctaagataattgaatgaatattggactgagcataaagaagttttggaaaaattccaaaggaaaggtattaggagcaaaaaaaaaaaaaaaaaaagctacaccatcctcactttatcttatcaaaatttttgcaatttttttctctgacatacttgtttttattcattgtatttggttataactaagaaaacccttaaaaatgtaatttcaagcacattatttcttagtacatgctctttttgtcaacattatcaaaattattttttctttattacaggaaataagttttttaccgtgtgtagttaccaaaaacaacaaaactatatgactttgaagaattaataaaagccagttttatgttttaataatttaacatttttatggacagagttttatgatagagactaaattaagaaaagtcaatgtcatcttgaagataacccataaaaaatgtgtctgaaatttacatgtttagtgtaattattaggttttgttaagactattttttaataccagagagagacaaatggtttagtgaagaattagacttacagtttaatagaaatacgattctcagaaagttatttataatttctgagcttaaaaatgttattttaaaaaattattatatgaatcacatttatcccctcagatattctggggttatatgatattttttaaaacgatactttgaaatatgtttaaaacttttaaggtgctaatatttgtttaaaaaactttaatatgaattggagttaagaattttacttcaacctgagttgaatttgttagaccttgagatttctatgactactattacaatcatgcaaagaaggcattaattaaacaaaaataatattttatgctcttggtatgggataatcatttccagtactaacaccttctctctgtgaaattcaaataatcgtaagaaatttatccatattttttacaatgtaggaactcctctctttaacatacatgagttaaatgatttttaaaaacagctttattgagctatagcagatatacaaaaaactatgcatatttaaaatataaaatttgatgagtttgaacatatatatctaccacatcaaggtaacagaaatatccatcaaggtttaatttataccataatattcatatttaatgagtaaggaaaatattggcttacaatatttttaagccagtattacatgtaatagtcagtaacaggtaatatttagatgttaactataatatacataaatctggagacctttttattgcctacatgtgtttggatatttcaggtgctattgatagagatataatatttaattcattggctccatataattcaaaaatgaaaagacatggagtgcagagtgttggtttttttactaaataacagttacaatcaatgttttatttatatgaaatggagtcaaataagttgaaggccattgtaattaataagtaggaaatgaagtgtgaacacatttcaacgtcccactgggaaatctaggtgaccaggagcagttaaactggacaccggttgtcatcttcccaggagagctctttgtcatcatctttaaatgaagaatgcaaaacatcatttttagatatttttgaatccttacaagtctgaaagcctttaaacatcataactgaaataatgagagactattaataaatgtgattgactaaaagagttgccaggtgggtttgattcccaagtaagccaaaaaaaggcaacagaagcttatgaaatgtcacaacaatttatgacaacttttgttaacacaaagagagtcattcaatttccaaaataatgtaattttagaaacatgttatttcatttgatcatagacgcaagttctatattttattattaaaatattttatttttcttctttctaaataaaataaaattaattagaaacctgaataatcaacagcaaaaatgtggactaaagttttacagttgtgacacaatactccatttgatgaacaaagagaaaactattatatggtttaaattgtttcctgaattaaaagtaattaaatctttggatttgtaaaactaaatacatacattaatatggtagatgtaaaagtaaaagccgaaataatttatctgtttccacagaagaaagaaaggggtagggagagagggtgaaagaagaaagaaaagcaatgagcaaatattcttaggcttcagttctgaactctaattgctgatttatctaacaagttgtgccttgtttcagaaccttgggggttattttaaatataagcgttagaaaagtatgttagaaaaaactgctcactttttatgtgagaatgccaaacttggccaaaatgcaatatatttatatatgtcctaaggtcaaggttttcatcaataaaaatactaaacctgcgtcctagactcaatataaaaaccataaaaagtgacttttataatccgaatatttttacccagttcagttctcaaattatttttattcttctgtcaaagccacgtatatacaagtcttagtgtctcccaatatcaaccaggttctactgcttaaaatagtcctaaagtgctttattgttttaaagatgaggcaataatgaataatttcaatgtgcttctacacaacacaccttacccctacaattcagagattccaaattgccgatctgggatgatgttgggacattggtatttttgaaaatacttgccaagtgtctaatgagtaggcaagatgtgaagcactttatgaggtaatttcaagtaaaggttctttgcttaaaatgaagctaatgcttctgctcatttatgtaacaaatattattgagaaataacttcagcacaaagattaataaaacactatcctgttccataatatacttaaattttaatggaacgtgtttgtgtgtgtgtgtgtgtgtgtgtaaaacatagacaaccaaaaaggtgtaattgaatgactctcaagtccacattcccagaacaaaagctgcttctcaaatacctaaatgttcttccattcctaaaattcatcatgacctaaaccaaactcaggatcatgtgtcataaattagtttatccacctgacgttcttatttcttaaagtttcagcattgttcctgttgacccagttttattccttaattcaacttttagacattcccagacattctgagtcaattttaaaaatcacttttaaatattacttcaaaactatatattatataaatctgacttttctcttcctaccaccaatatgcagattcttgtcctcattacttctcagtataattattctacccacggtctctaagggttaagcttggcattgccaattattacactctcagaaaaatgttttgtactccctctgcctttgtatggcagagaacaccagctatttctcaggattcgttctcccctcttctacagtaacacacacactggttttcagtaggaatagagatagtttctaccatccttgttgtatgtatgaggtggaaaaaaaaatcctggtcaaaagtatatgagaaacttccaggaagtctccttagacagacacaatgcaaatttcttcctttccttttttggtttcccttttattttttcttttaggctggaatgtttatgttattgatggaacttggggagacacatttggtgaccttgggaatgaagatctatctgtaggggatatagaacacacttggctatgagaaactgtataccacgataccaggcatagagcattatatttacatgaaaaataaataaactgctatgtacttacccaccgttatgatgagcttttggttactcttaagtaaatataatccactttaaatttccctctttctatatctgatgtaatattatatttctcctagaagtatcttcttgactatataactactccattccttgtttttagattacatcttatcatttggtctttcaactagtgttcaatgaggacctactctgtgccaaccatatttaaattgcatagacgccagagttaagtcagataaaacattcagccctcatgaactctatacttaagttgaagaaacaagtaaacaaatgactcaggaaattcatattatgttatctggcaataagtgtattgaaaaaaaagtaaattaagaaagaaggatagcaaacatcagggctatgggaggattgtggagggggaattgtactttaaaataagccagggaaggcctcaattaaaaaaaataattctggccagcacagtggcccacgcctgtaatcccagcactttgggaggctgaggcaggcagatcacctaagatcaggagttcaggaccagcttcaccaacatggagaaaccccgcctctactaaaaaaaaaaatacaaaattagccggatgtggtggcacatgcctgtaatcccagctacttgggaggctgaggcaagagaatcgtttaaacccaggaggtggaggttgcggtgaactgagatggcgccattgcactccagcctgggcaacaagaacaaaattccgtctcaaaaaaaaacaattgtatcatgacttgaggagagaaggaaccaactacaatggtgtgtgaggatagatactggaacctactagagggaggatagagggtgagggacaaggctggaaactacctattgagtactgtactcactattaaaccccaatgtcatgtgatatacccacataacaaacccgcacatgtatcccctgaatctaaaataaaatttgaaattatttgaaaaagaaagaaaaatgtgggggcagaccctccctgactcccaacttttgttcgtggtaatttctctacctgaaggaccctttaacattatgttaggtttttgaaattcaagatttcttttaagatctcaaatacactttctttaaaaagccttttctactacccttgtccaggtgatcactcctcagtgacatgatagcctgactgattttactttctatctcttactaaagtctggctgtaattaagtaagtcttaaccctcttctctgatatactgtgtcctgaagttatgccttgaaagataacatttatcatgcaataccaattagcacacaacaaaactcattatatacccatatatgcatgtatgtatacttctaactcaacaacatgccattttaatatcatacattttagcacaatcaattttactaattaaaatgtttgtttccttatatcaggtatgctggaattctagttaagtatgcacaaagtagcttagcaagtgaggattatcaaagagagaagtgtaatgataacaatactttttaggctataaatgaggattaatgaaacaattctacatcagatttctcaccaaacatactaattattgttgtcttttacttgactgactggccaagagaaagactgtcagatccctgttttctgaaacagcacagttctattcttttgcagttgtggaggccagaattcagaaatgggttttacagagtcaaaatcaatgcctctgaagggcaatgctctctctggaggctctagtggagaatccttttgcttgctttttccggcttctaggtctgtaattcttgtttaccttgccttacggccccttcttgcatagccagtcaacagcacagcaccttgcttcagttatcacattgccttcttctgtgtaaaatctcccttagttcaatcttaaaagtacacttgggattatatttaccaactatttgagaatccagaataatcactccattttaagattcttaatttaattacatctgcaaaatctttttggccataaaaatgctcacaggttccaggcattaggacatggatatctccaggggccattattcagcctaccttcatgccatataataaaacaatttggcttgagaagacaagcagcgctttgttctgagaagaaagttcaccagcacaagcagcacacactggaaaattgaaaatatactccttttatatctagaatgcttaaaatttaaattccaattcaaatatgccacgcaagtattccctatagctgtggcagtaacattctatctacggcagtctcaagtggaattccttcatgacttcctcaggattttgcccatgacagggagggaactgacaagtatactgaacatattctgtctcttccatccttaccatattgcaaagggtcacttcatactgtagatcggatggagaagagattcaaaccaaacatccaaattaatccttccttcttgtattttcttataaaataattattctcacaaattgaactgggatgtttgagtttaaaagccaagaattggccacctctcttctctggtgctatctgacaaattcattctggggcagatggcagtagatgccttaatagggaaacataatgtggaaaaaaaccagttatcacctaacattatacacacacacagagtacatattttaaaacgtattcatatttcttccccttgaagagtgtcctaaaatttcagcatgtgtcagcatcacctagaggcctttttaaaaaagatagccaaatcctactcctagaaaatctgatccaattggtctgcagtggggccaagaatttccatttctagcaagttcccagatgatactggtcctacatattcagggaccactgctttaaaatacaactgatactacgtcctcaagttctcagtccacagttggtgactaaaaagccgcttttatcatggttctgaaatgagatcaatttcacctatgatacacagcctacaaaaaaaaaaatgccttatagtagctttaatcttgtataaggcatttacagaagagattttcacagtgtcagtgaacctcagatttgtagtgaatctcaatctcctcctacatgtaatttttctccttatcataaacctcaactagaattagggcaagcccctcagtgagactaaaattccatcagcttcaggtaattccattacctacagaagtcttttcagaaagagaacctttgatcaagcttcgagggtgtcatgatttctctgagagatggaagggaaaaaaataaaatccattaccgcaaaataaccagcagagaatccttcctcactcccatctctagtccccttgctgcataattgctttaaggcttattatggccacattagggtttgagctcaaagtcttctctaaaacacaaaatgtagagaagtaattctttacgaataccgaataaagcttacattttttgtacgtatttttattaatgtggaaattccatttattaccaattcatgtggcaggaacatattatcctgtgaattaaaatctctatggtgacatggcaagacccatctaagaaattctcaaatgaacataaattaagatcacaaaccacatagataaagggcaaggaaatttacctttttcaagatattgttaatttttaaaatgttctttattatgattttccagaattttaatcaagctcacatatgagctctactactttttctcctacaaaaccaattacttaaagctctacaaacatacgtttactgaaatgagcagctttgtcctttagccttgctgcgggcatcaaataccatggcaattatggaaagactattcaatgtataccaattggtgtcaaaaatcaataagacttggcattgcctctttatgtaaggacggtagtttaccttctaacattattatgatagttattttgtaattcttgccctgaactctgtttttaaaatctggattataaggtaatttattgggattctattactagttggcataaaagaaatgagtctactggtgtgttccctagagcttacttcagatttaatgctacagtaacaaactttttgccatccctgtggaaagcaagagactctcttgaaaggctcttagatatcaattattgccttcatttcctgaaattaagcagaaccattgtgaatgttaccaaataaaggactacaggacgtaaatcatatacacttgaaagaggatatgggaagggaaggtctgaaaagggcacctggaagttcagagagaagtcaccagtaagccctcttgaagcactgaggtctggagacaagtctgaattttcaggctggtccagacgccacagtggaaccatgaagggaagctaatgggagctgttgcctctgtgcctctcagtgggcctgagatcactgtgggtcagcagagaagtagggaagaagaactgggttaattagtgggagggaacaaggacaagttggaccccgctggcctttctgcagctggctgtcaccttgtgtaatcatgaaaccttcaaaaggcaatgggtcttccttcacctctaatttccaaatctcatgaaatgcctccgtggccaactctaactcagaaccacacagagaaagggactcaggaaaacttagttccgggttagatacattgacacagagcaaaactaccactgtggttttgtaatggaagcattaccttttgctacttccttattaaaatcaaataaatgtgtgtttcagtgtgtaaatgagtacctcgatggctaaattctggttttgactatatccaacaaatattatatatatatatatgtaaatatatatatagagggagcatgcatagataggtacaaatgctatatatttatatatgaatacgtgtgtattttacatataaacatatgaataaatatgtaaatatttggagctattttatgatacatacacatataagcacacacatatagtcaaagatcagggctagttagaggtgtcttctggcactcagcaattctttttctctttgtaaggaaatttaattaacattatcattgatccctcatataatgaggttatatattttgcatgcttaattaaaaactagacctggagaataaacaaaataaacaatggtggtaatagtaaaacatgagttcccaggtgttttttagaagtatcggtatgtgataattatctatttcttgaaacatgtttgagggtcaattttactctttacaattttccagcatgatacagttggtgttaactatgctgatgattccagttaaagacacttataaatatcagtgtattctactgtgcagattcataggacaaagtgattttaactgggaccaaaaactgaaatgaaatgaggtaagcacactgccttggtgggatttgttacttaatcagttgcaggacacacagcagttgatgtattctgacagggagaatgagaaacctggattatgctaatcctttcatatgttaatccataatcctaataaaaacagatatgttattctctcatttagaaagttaaagcaaaggccgggcgcagtggctcacacctgtaatcccagcactttgggaggccgaggcaggaggatcagagggtcaggagatcaagaccatcctggctaacatggtgaaaccctgtctctgctaaaaatacaaaaaattagccaggtgtggtggcgggcgcctgtagtcccagctactccggaggctgagacaggagaatggcgtgaacccaggaggtggagcttgcattgagcctagattgcgccactgcactccagcctggacaacagagcgagactccatctcaaaaaacaacaacaacaacaaaaaagaatcagatctcatgagaactcactatcacaagaacagcaagagggtaaccaccgccatgattcaattactttccacagggtcccttccacatcatatggggattatgggaactacaattcaagatgagatttgggtggggacataaccaaactatatcacaagtttaaacaaatttaacctctatttcataaaggaaattattaagactaaaaatatgctcatatgtgggctttgctttacaaatgtgaccaaactatttcatattaactgtgaaaatattattagctttgagaattaataatatgagcaagtaaaatgagcttcttctccttcctttaaaaatgtgccaaccaagatgaaaacattagctctgcttgtaatcatcaattttcaataactcatcaagtcccaatgcttgatgtcactcagatcaccctactggcaatcggttttctctaaccttgtgatattctgtgtctctgatccagggccaccacagcagttaacttattcaatcatgcctgcagcaattcactttatactttagaaaaattaaccaggaataatgtttccaaatcatgtggccaaaactaactgtgcaagggactatcataacccttgcccagaggatgagtcaagtttcttaacaagcccgtatgtccatatcatgaattgctattttatgtgtatggtgatgactatggaagaggagaggatttggatctctgctagaaagtgttggtacatttcctactccttttttatacttcattccagaaacaatctgctaggcgcattaggaaaatgccagttcagtcataactttgatctgaaaattaagaatttagggatcaaaggagagttagtactactcttaacaccctcataggtgcaggatcaagagtcaagaaataactgacttcaaacactttgaaactgtgatgtccacagttgaaggattgatttcaaaaaaacccacaaaaagtccggccacctccaaaatttaaaaagcattaacatgtaaaagagtacattatttctcaataacactttctacttgtggatatagcttaagactggaaagaaagatcaaaatacttgtaatgattacatcatttttatgtattgatgagtatattttataagttcagaaatgtcaaataatgtaccagattgtatatttctgtgcactcatactgaattatttctgacctaaaaacaaaataaaattgacaactactaatttaatataaatattttgtgagaaaaaggaaaaacaattccaaatgagatcaattcatttcacataatgcttctttgaagcaaactggtgtctgagtttctgttggaaatttactatcctatagaatttctggtatgtgtacataaataaaattgcttatattcctgagtattattttgtttttccagttcatctctgggcacaaatgattttgaagagtgggaagaatttagtctttataaataaagaatatctaatggacaaaagtaagatttctggattatcattagcaatctaagttgcttattttctttaattataatatctcaaccttaatgaagcaaaagtaatatgaagcatctgtgaaaatatattattgacttctaagatttctaaacttgtttagttttaaaaatttacttcaaatatgacttctagatttttcaaagttcagaagactgacctatacttctacatgcctatattaagaaaggattaagggaagaacacatcgggaaaagtagagcaagaacttccaaaaatccacttttccataaaaacaatgataacactgatgacattgtcaaaatcaatgtttttcagaactctggaaattaaacaaatgcttacaaccatccaaggaacgtttattccacaaaaaagaaaattggtggaactggaagtaggaacagtgaggtttgtagtatttaagtttccttattcccatgcacattcgcacactgccctctccaacagcttcccaaacatggtagctgtcaaaaccagcaggctagaagcaacttaaggaagcagaacatgtttggatctcctcaaaaagctcttctcctattgtccctatttggcccaacagctccctaaaaaatctccatttgcaggacttgtcttttcttgacctgacacagagctcaggtgataaaaagcccttgattcaattttaatatcttactgctgacgacgtttaagccccacaactaccttgctctttcccttctgctccacttctggaactctaataagaaagtctagatgccacttcctttggtgtctttgcaacttttaaaccatgcaattctctgtccgtatgcaagcgcccttgcactggcaccacccccttataacaataaaaatcccaagcctgtctacttctaagtttttagtcaagacatttgggaccaacttgagaggcctctcctgctgtcctcataaagccttagtatgtaaataataaactttccatatttccaagtatttggtgtgtgcttatggcatcatttgccttgacatctgaaacaaattgtagatgggaattggtaatgtctctgcaggatggcctgaacaattgcttcagtgagctgggtgtctagagaatgaccactgtcaccatgggtctgtcttctcttgcgtcagcttgttaactgactctgttatctgcaggtaagcatagattttgagctgctgcttgctggttagcttgcactttaagctgtgctatgtcgtgcctcatttgccgaattacaccaagcctctgttaaaaaaaaacaagatctaagtcagaaatttgggtaattgacattttgggacaggactacaggactggaaacttcgtaaagtctctcctttttttttttttttttgagacagagtctcgctctcttgtctaggctggagtgggcagttgcatgatctgggctcattgcagcctctgcctcccaggttcaagcaattctcctgcctcagcctcccgagtagctgagactacaggcccatgccgccacaccagttaatgtttttgtattttgagcagagatggggtttgaccatgttggccaggatgatcttgatctcctgatctcatgatccacccaccttggccctcaagggtcttttgtctttattccacacctatctgtgtatcttagcatgaatcatgtctctcaattccagcataagccatgaccgatggtatactcaggggaacaacttctataccctatgtggtacatgggccctttggatggtaacatatgtggagaaaaagcacttattatttaataaacagtaattctttaaagatttgagttaccgatgtctacactcctaaaggtgaatggctcagttgtaccctacaaaatgcttctgttgctgtttctgcctctgttaagacaaagatcatgattctcaggactatagggaaatatatccataacattcctgtggtacacccacttaagctcagacccttatggccaataaaacaactattattgccatggctgaggccctaaagatggcaatactactggtctgaggcttttttggaggaaggaacttagaaatatgagcagggtagaaagcctaccaccctaaagtgtatcaagtaatcacagagatagggagacagagagaaagaaacaaaaagagacagggagggagagagaaaaaggacagaaagaaaatgggcaagggggaggcaggggaagaagtctggatataggaaaagtaaacaaaaacaatgaaacagaggtccccaatttgacctaacttgaaaaccaaaatttgctaaaagaacttatgtaacagaaagataaaaggcactgattgtattttgcacctctacagcaaaggctctgaaataattttaacacctgctaaattacaccaatttgcaaaccttcgtggccttaatactagaattcaaattacagttatagctgagaatctaatttaaacaagatttaacctataaatttagggcagttcttgaacacaaaatataggacagttataatccatcttaactacactaactgttgtcttgcttaaattccccgaggacgtagtatttattgccctaaaatacctctagtagtcacaattgctgcgatacattatgtaatagattaaaattaaatgaaacctttggcatttacaaactggcttgacaaaatggggccccgtagatattgtcccttcttcccagttaaaatagttaatacgtcccaatgtaaattaagataggacaatcaaagattgaaacccattgtataagagctatttagaggaggaatgattatctccactcattttcacttaacccaattttcccagttcttaaatattgaacaaatgaatgggatctcacaatatattattgtagtcttaatgctaaggcttcatctattggacatcgatactcaatattattaaaattaccaacacagttgaatcagcaaaattattttcctattatacatctcaataataaatcccagtcaatgcttatttcaacagctctctatctacaatttgcccttcactccaaagagatacaataatcttttacctggctatccatggggtatgggtacaggccttgaaataatgtataaccatcataagcaagatcttcacagcatctagctttcttcaatagcataggcatgacgttatattggtgacatccttacccaaagagattcatttgacatgcttacaaggaagctcacaaaaaaagagaaagggccattgctccacgcatagttcatgggccaactgcctcaatcaaatccatgagaattattttaataagttaacagttgttttatccctgatagtatcaagaaacacccacaatgttaaaataatcctaatatattttagttttttattgtgctttgggtgcaacatatatccctcatataaaaattttacttaagcccatttatactgttgcttttaaatttacttagctttgaaatggagcttttcccaacaaaactttctagactctgtcaaaattgcaagacaacaggcatccccatttgtttcttcagacactcttcattgtagaagctttggaaacctactctcatatcttctggagtatgagtcacctatgatgaccacatgttgtccatagtcttgtcctgaaaaaaaccagccccgttggccaggcacagtggctcacacctgtaatcccagcactttgggagccttaggcgggtggatcacgaggtcaggagttcaagaccagcctggccaacatggcgaaaccccatctctactaaaaataagaaaattagctgggcgtggtggcagacgcctgtaatcccagctactcaggaggttgaggcagagaattgcttgaacccgggaggcagaggttgcagtgagccaagattgcaccactgcactccagcctgggcaagagagcgagactccctctctaaaaaacaaaaaacaaacaaaactagccctgttggttccatgctgtatataattacagcagcaattgcttgtgacaagctgggatctcctggaaaccgaggatctcacaggttctgggtctttggtcctatctttccagttgcatgttatgccttgggtcatagaagcagcaccatacaagctcagcatggctactgaggactctcctgcaggacggagccaaactctgacatatcccataagcaagaggaggtagctacacctttactcacttctttacagatgccttgttgccagaaaatgtcatccttctttcagatgccatggctacctgggaatatctttgtgatgacagcaagtgacaatagaggttcatacacatcacacttgatattactggtattatgcaagaggaacccaggggagagttgctacttttcacaccttaactaggacattcctgataaaggacaagatccaagagtcagtacatttggcagtcatcttaccactggatgtcctggaaaacagcctcagcatatagaatcttggggtattaacaatggttggccttctgggtcaagccaatggcagtgatgataactctttatcaaaagttacccccttaggaatctcttgactcacagacactcaaaatataaaccaaggtcacacatgtctctgcatatactaaagccacagtaaagagcctcacctccttaatcccttcggacttccagacattggcaataatcttggagaaatcacttattgcggtttcaagtctcttatttaataaattatagaactatatatttttctcctgcaaaagaaaagaaaatttctttctccagatgtcatatagagagtctcttcaccaagaactatattattttaattttaataaagatttccatatcatttgggtgatgcaacttaaggcaataggtcagcactttagagctctttagtttctggttaatctttaccttagtcttttttggatagaatgatggtttaattacaatttcttcttttgctgttccctaatcttgcacataaatctccctagcctcaggaggatgtcaaaaagagagctaatttttgcagcatttttttttctgggatcagaatatgtctgctctcttggcagaatcagtttttagtctagaattttccctggtaattgtgatgtatcttatacgactaccaagatgccttatttattttgtaaagccttctaattattctcagtgaaaaaaacaaattaaaccactcaatactctattaactgatgcagaaccttagctaatgttatgtcctatgaaaaaactatcatgaactagcaaaaacagattcataagtagtcttattcaagtgtaagctgttaggttattttatgtataaaatgacaaaatcattactctaattctaataacttgacctcatgatggggttagtgtcatcctttatgtgtgactgtcacatttaagacactctcatcacactatcagccccaaaatacctggaaattcaaatgcatttcacctacctatctattcttgatgaagatataaattcatgagcatagcttttattttaatgatacatcttagaaagatgctgtattgcagtgtccagtctatctttaatctacgtcttataatattcttccatgaaaaactgtgtaagtaaacagatggtaagtttatgtaaattgttaaggttgtatctatgtgtatgaatacatgaatattacatacatacagtacatgtatatgtgtgtatatacgtatatgcatacttatgcatgccatttttggctagataaccagacaactttagaatcatttaagtgaaaatgctgtattttatttacatatatatttatttgtaaacttcgtccccaaaaatgaatcaaagcagcagaatgcacggcctaaatgaaggagctttcatatcacagtgctatgcacattgtgtagtatctttttacctttcctaaccaagtgaaattcaaaagaaaagaaaatgatttttcttgtattacagcttgattaagcttcttatttagaacacgactagataaatttacgggatattttatgaaggtcatctaaattccactaagaaaattaaattaattcacaagggttggctgggtttttatgaagtattatgaagaattccattgttattacctattttaagataattgttaagaagtagatatcccttgttaaattaacagattaatttgaaaaatcatagctaatataatagttacccacccagttatatcctttagttactctatggaaaaaattactaatatcagggccaccagcaacaagaattaatcaaagtgccctcattatgaaaagaaaaacaatttactttttttcagttttttacagtgcactcagaaatacaattattaagcttttagcacttgactaatattacaattttgtaatgaacagatgtataccatttcaatttttcaatatgatattattaatattaaacatattattcccggtggtggaaaacaaattttgaatatattcattcttataactttaagaatatagttgttattgttcttgtcattctttatgactcattgatttccctcaaaaattaaaaataaaaaagtcaacagtttttattactgttcaagaaatggcacaaactggatgctaattattgaaggcttaagaatgggtttcagatatttttaattctaactacatattctgagccaggggttcttaacgtccagttcgcagactggtactagtccatggcctgttaggaaacaggtggcacatcaggcacatcaggaggtgagccgcaggtgagtacgcattacccactgagctctgagctccacctcctgtcagatcagcgggggcattagattctcattggaggaggaaccctattgtgagctgcacatgtgagggatccaggtcgcatgctccttatgagaatctaattaatgcctgatgatctgaggtggaacagtttcatcccaaaaccatccctcacccacgtctgtctgtggaaaaactgccttccatgaaaccagttcctggtaccaaaaaggttggggaccactgttctaagcaatctgtggtataatacactttctgaaggcaaacattttaggaggcatttgctttccacttgtagactgaatgtttatgtatccctgcccccacttcctatgttgaagccctaatccccaatgtgatgatatttggaggtggggcctttgggaggtaatcacatttatctgaggacatatgagcagggggcctcatgatgggattagtgtccttataaaaggaggaagagagatcagggctccctcgctttagccacatgagatcacaggagaagacagccatctgcaagccaggaagaggacactcaccaggaacctgagcatgctgcaccccaaacttggacttcctgcctccagaactatgagaaaaaattgtctgttgtttgcaaacaccgcatgttctcactcataagtgggagttgaacaatgagaacacatggacacagggaggggaacatcatacacgggggcccatcgtgggggtggggggctaggggaacaatagcattaggagaaatacctaatgtagatgacaggttgatgggtgcagcaaaccaccatggcacatgtacacctatgtaacaaactggcacgttttgcacatgcaccacagaacttaaagtataataataataataataataataaaaataaatgtttgttgtttaaaccaccttgtctatgttattctatgatagcaacctggactaacataccactcattcataaacatcacattcaaggctaatttgcaaacttttgttcttgattgcttgatactctagcttctaatttgctagaacttattttgcatgtataaacaacttaagcaaccccaaaaggatggttaaacaaagaaatgtttgcaagtataaaataccattttcttgaactttggtcatatactatggaaatgataacaaatttcaagtttttgttgctgtgattatccttgcaaatgttaaaataaagaaaagtgaaaaaatgaatagactttaaaaataaaataaacagaaacaaataatacaaaattaattatagcaatttatatttgttggatgttttaataatgcccctgaataaaacatttttgctattgatttatgcagcacaagctataactatatgggttttccctcaaattcttggcctttttaaaaatagcttatgctaaccagaggaataattttactgtaatgtctgagagattagcttttccccccacagtatttttatgctagcggtaagctgaatagtggctccaaaaacacccagatcctaatgccggagtctgtggttcttatagcacagagaaagagaaaaagagtctttgccactgtgattaaattatggatattgagagagagagattatcctcaggttgaacttaaatataatcacagtatttgtacaaaagaaagtcacagggccagttgactacaaatagaagaaaagtcagccatgtaataggaacaaagactggcagagtcagagagagaagatgctatacctctgactttgaagacagatgggcaccatgagccaagaaatgtagctctgcatgcaggaaaagggaagacatagattctgccccagagcccctgaagggagcacagccttgccaacagcttgattttagtcccacagcactgatttctggtcatcagaactgtaagaaaattaatttctgttgtctgaagttggcaaatttgtagtaacttgttacagtggccacaggatagtgacgcaatattgtgaatttattttttcctcgttaatatatattgtttttagtgctacgcattctcccccactcgcataaacatctgaaggtacatgcagcatgctctttccttgttttcaaaatatcctaatcaaagtacaaaatttttcaattgataaataaatttgactaatactctaagatccacttctataaaggttaaattaaatgtgtatactttttgaagcctattgatcagaatcaaaggtacttaaatatgcatctactcttctgaatccaattttgaaggacattttgcattgtaatgttagaaatacttagaacctgaaacggtggttatttaggttaaaatagctatttttcccaagacagaggttattctgatatgtgataggaagaacctaggtggtatttaacaatccatttctttgaattactgcttcacaccaaaacagtcaatctctttccatttagcatggagttttaagatactgacaagttactattgattcaagaaagtaaattcatttatgactggaaaagtgcccactttctcattttaaaaacattatcagagtacatataagaccgaagttcttgttctgtgcttctctaatcatagcattacattcattcctaacataataactaactaactgtattgagtgcttactatatgccaggcactggttaaaaattattccatgtagatagcaaggtaagtaatttattttatcacattaatcctgtaatatcaatagcggttatgctacaattacaattttactggtggaaaaactgagaaacagagaggttacaaaaacttgcccaagagtgcacacataataaacagaagagcggtttatttgcaaaagccgtatccttaaccgtaatgcctactgagtttctgtaagcaggggttgcacgagcaactgctggcaagccacctaaagctcctgaaggtagcaagatggtaaaacatttcttagtcgatgctaaatatacaatgtattgtttacacaaacacacaaattttcagtgtgcaatataatattcacctaggatggattagactggccacacgttagcaccgttctccccagagctgcatatgctctaactataaaacattcaaaaggttgcttttatatgtagggtatatgaaatttagtaagatacaatctatagattctacttcttaataatttttaaacttaatatggaatctagatacatacatctgtctctagtacctgtataaacagtgtaatctgacccataagttcagcatgaaaatcattttaaaatatatatataaacatttttaaagttttaaattacactttttacaactttaaaatttaaatttattactacaataatgtttttacaggcagcaaatattcctctcttggattttctaaacacctctaggttttcgtagttcatctgccctggaaaccagttacatctcaaatgaaagagttaagctaagctggtttaggcaatgagtggggatgcatcttgcttttaattatcctgctgaaaactggtctacacagtctgatatatgatacatattttgtatatttcatgatctcctcttagacttcccataggcattaaacaaggtgattttctcctttcaagttaagcctgcctgagagtgcctgttctggcttagggcaggagatggaggattgggaggtggctacttattcaccagccctaatgttttcttctaggtgtaagcgtctgtattcacttggcactcttgttcttttttcactcccttatttactctccccatatccatttttcttctctttttcctttcttatttgtctgctcaaaaatgacatgttttcaatggctcctggatgtgcagtacgctgaacagtaaaagttccgtccctgtagggcatggttttccaagatcctgtgcctaccagggggtcacactaatactgacatgctctgttataaagcgcatttcggacataccagatcaagtcctttagttcagcttttcgtttttagataaaagtattatttgatttttatctacctttcattgaatatttctcatcctgttacttgctgtaattcttactttctaaaaatcttttagatgttctttttcattttaaatgttctttttccataattgccatcttatgttttttcatcctattcttgtattattaggtatccatctatctttttaattctatcgcagatgaattatttgaaacccttcccacttactctgtactacagttaaagagttgggcacagtctattctgtatcttgagaggagggtaagtaaggaagaacccagaaagtatttaacagctcatttccttgaattattgtttcgccccaaaacagtagatctctttttatttagaatggagtttccagagagtaatttctttcggatgagtagtgtcttacatggaagacttgagctcagctctctgttaagaaattttgtggcctgactgtttttagggcccaaatatcctctgtttcagcccttagaaaaatgatttaaaagcattgaggtttaaattggaattagattttacatttcataacatttcctttatgtggttgctgtttgtctgaatttaactatccctttaataagctattgatgttggaatactctggaattttgctaggtagtcaatggaatctcttctgaataccatccctcaaggttataaccacaggctacataactttcagacagtagctataaaattcaccatgatccattccaagattggaatatcagagtgtaactgaaataaattatatctaaaacctcaaaatgtcaaattatgcacttagtttttgttgttgtttgcttgtttgtttttttctgggagacgccccctccccatcacggctcgtgatctctgaaagggattccccaaagggagaagactgaactgacctccaggctctagttgggtagatgctgaagtacgatcagcctgtgtttaccattgcttcactttgccacatagtgtatattctgaaaactggtctagtgctggcccggatccctgtgctggtccctatgaatatttgagggatactgccatagttccttcactgcttaccctgttaaacgtgtttcctgggacacaactgactcctagtgccctgagtgttctgggtcctgtgtattcatgagctaaatcatgaatcactaccaaaaatcttgtgccaaaattggtttaaaccaatggttctcaaccatgaacaatttagctcccccaggagacatttgattatgtttggaaactttttggttgtcaaagcagggacaggaggttacaactggcgtctagtgtgtagaggccaaggatgctgctaaacatgttacaatgcacggtgccgcacctcaaaacaaagaattacatggtcccaagtgtcaacagggctgcagttgagaaaccccaatttaaacccttagaaacttaagccaaactttcagtatgtggtatttggttttctgttcctgagttagtttgctaaggataatggccttcggctccatccatgtccctgcaaagtacgcaatctcattcttctttatggctgcatcctcccacagccagggaccatcttaagtgtaggtcattattctgagagcattgtagttgtgcctactgaggataaagaaaattgtgaagagcaccagacaatgcagattaggccttcacctcagaattctgtttgcttagaattgaggtttggagtcatgttctcatgtctgattagtttctaaagatttaacattcctgttgtcttctgtgttctagagttgtctgatgaagaagggagaattcgatgttcctctcatagatgcattttggttcatagaagattttgttctctcaggtgggacagtgctaggaaggacagtgccacagctgtgcccacctccttccttgcggtttcccatgggaggaatgaagctaatatgaacagttcgatattggagtatctattgggtgactttcaacacctggcagccttagaatgaccaaaacacaatcaagtgctaatcactcatcctctttcactttctgtttcaaagagcattaaggtcttttaaattgatgctttctatagaataaatgactatgaagagggctgctctgtttccctgtgtcttcttccagctctctctgtacctgccaatctcagcactttctctatccctgtttgtgactgggtggagttatccttcctcaggagataacttccatcatgtcactggttgaatggccacaaaattatggccagctttgcagtctgctttgctatatatacaaagattaaattgaattataaaataaatctaattactagtatttcctaaggctaaatatatttgacttgctactcttatgtagtctacgctcgcaccattcattgaataattaataacattgattttatcacaaattccatatgctgtatgtgaaaattaattacttttatgagaaagctattattgaacagaaatggttcttggctgtggtgtcagccaccatgtgtcatttaggacctctgcaactgaacctaggtcactactcctgtgtacagttttgcaatctgatcagctacagtgaggtggcttcatactggtaggctgggctcattcctgctgatcaatggaataatcgctcctagaacagttttaatgaattatgcaaaatgttcatcttaattctgtctcaagtagctctatgattttgtccatgcctctgatttgccatttctccatggttcaaatgaaagcatggcaacaataagagttcgccgcctaatctgtcagttatcaaatttccagtgagggtcggggtagggttcctgtcattgtctgacactgctcttagttgaattagcaagtaacctaatacttcaatttcacagtcaatgtaagtacagaggactacatttaactttcttttcctttcagaagctaggccttccagctttctgttttgctcctagacatgaaaataaggctgcaggtggtgactctcattagcctaggtagttcattttctatctggcagtgaataatcatagttgtgatctaggtaggctctgacaggaggtcagtttggtaatcttctatgtttttcagttctacttttccactaaaattacaaatacatgacttaatttcgcattcacaaattaagtacctctcagagcacttttcttgaaagatggttggtcagaatctctgaactctttgggatgtctacagtgatctttataagaattttgcagcctatgatacctttctctatccactgccttcatgtcaccaaacacacgtaggcagattaggagggattctcctattgtgaggtcaaatttgcaccaattttatgggggtagtcacacctcatcaatatgactagatgagttatattctgttaaaaatttaggtctgggaggctctttcctctaacgtaaatttggaaaatgtaaaataggagacagactcttaaaatcaggtaatataaggagattaatatgtcatgtaactactgatccctctgcagttttgaatggagtatatcaatttattacgtatagaaaaacaccaaaatattcccacctgacagaatatagcagacctaagtttccattaaatagttttctgagcagaaggaaaaatgactcaaatgactcaatgttctcctaattctggaggtcccaaagtctataaagagcaatttccatgtctcagtcccggtgtcctcttactgatgatgaacttattgtaggaaatctctagcaatataatgatgctcaaaatactgaaacaataatgaatttcctattcattgtatctggaacaaagccttgtatcttgcagttgggaatatatttgtgtacatgagtgtgtgtgtatgaatgtatttacacatatgttttgaccttactgttagaaacatgaatatatttctgtacgtaaatatattttcatacatatgttttgatcacaccattatctaagtctgcatacatttcgtagataaatgtttttctagttatctaagggataggccattgtcagatgtagttagaagcttcttaactacccttttacacatctgaggtgatgtacagtcatgttctgagtgacgtcatgccaatggcttttagaaatgtcacttaaacaccactaaaggcttataatctctgtttaaacgtcttcaaaatgtttttctcaggcagaaagtacatttctgttcttttccttgaaaagtttattgtttttgaatttttattttttaagaataaaattattatatttcttgcaataattaaaagcaattttcttcttcataattataatctcactgaattaaatgaatgcctggaagacatgtgattttacatttcttcttgactgaacactcaattacaaggatcctcatgacagaagcactcagactgaggtagaagcacacaacctgccagaaacctggtaatggagcaagacacagagggctccctgcaaacacacatcttcacagtcacagaccattcaatatttagtgtgatttgtttttaaatttaaaaatgcatattaattatatattgtgtgtatgtgtgcatgtgtgtgtgtaagcatgtgtgtgcatgtatgcctaaatgcaagctggagataaacttattctgaggcatagacatgctatgtaagtatttcatatttgttcagaaggtctatgctttcatacaggtatagatacgtacatatctatcagccatctatctatctttctctattctgagtgagaaagagatctaccccctttatttaagcatagtagacacacacacacatatatgtaaagaaacagagagagaaagagaaattcattccagaaaatggttcatctcaagaaaagtgactgagtactaaaataaaatattctttgaggataaagaaacagctgagggttggggagtaacactgaatacagtgcactttactcaaattttaccttataccaagcgtactcctcctggacccttagagtactgggtttgcacttaatgaacaagaaaactcattaaaaaatatattaacattataatgggactttgagagtacatggtgaaatgtacaaagtcagtcactgaccctggcaggatccggaagtcacgctagtgctttaagcacttccaggaagagagtccttagcacagacagcagtctcaggttcaggcattactgtcaggggcacagatggcagcccaggccccatcacagtgaggccaatgcctttgccaggtatgagtgccttagtagtttctccaggcacaaaagcacaggtggaatagaagagaaaactgccagttgccaggaaatgcccaaggagactaatttatagagaagattcaaaacaatccctgaacttcccagatttttttgagaagtgtttggctggaatcccaatacagcgattggaagcagaactagagaaaattattttcttgtgtttataattagctacatagttttgtatagagtttgatggtttggtttcctagtcatacattgttattttctccatagtataggaacctaagagaccacagcaactggtatcagtatcattctgtatgtgtgactgtgtgtgggtgtatgtgtgtgcatgtatgtttgtgactacataacatcaatgtcttatcacaaagtatctctgtaaaaatcttatcacatttttgtgcatacatgctgtcaatttattttaaaagggactttcattggatgtaaacatagaataccagccactacattaacactaaggaaatgttttgttttcattttggatagattagaaaataagcatctattttaaaatgcatttgcattacaaatgaaatactacatatttcagaggttcctacattttctctgttcatggaatcctttcatatttttattttttacttttttgtcaaaggaaccctaaactaaaagaaatatctaatagtttcatgtatagtagttaagcccaacaactgactaagtattatttattaacaacttaacacctacggcatacaacaacgtctcacacttccaaatcggattgcattctatcaccctcattttctgctctccactgttttttctcaaagtacttgccttttatgttagctgtctctgaaagcccaggttcacaataataagacaccactataaggagagtcagtgatctaatgcttaactacgaactacttcaagcgagtagttttggagaagctgctgtgttcccttgaaaatttaaaatgactcctaatctcagtatgaaaattttaaaattttcaaggcaacacagcagcttctcaaaaactactagcttgaaatagttcatagttaagcattagttaatatgatgagttgtattccaggttctctcagttaggaatatgaacttactgacagacaatagtccttttaggcagttgatgaattcagaaaaattacagatgaaaaatctgggagaggtatctgaaactcatacatcatcagtgaaagttactagtaccccttacctatgtgtgcttgctaatacagcatcccactgaaaagaaccttatatcatcaggatttttttgctgtagatatattgagtatgcccacttacaacttttcacgtgattatttaatggctcagcgttcttaagaaatgactttcttcttttattaaaaaattgaggctgaggcgggcagatcatgaggtgaggagatcgagaccatcctggctaacatggtgaaaccccatctctactaaaaatacaaaaacaaaattaggtaggcatggtggtgggcacctgtagtcccagctactcagtaggctgaagcaggagaatggcgcgaacccgggagacggaggttgcagtgagccgagatcttgccactgcactccaggctgggcgacagagcgaaactccatctcaaaaaaaaaaaaaaaaaaagttttcctcttcattatcctcagagaaaaggaaatgactttatcttattcaaaagatgaatgtgagttatgtcatgtgatagtatgtttaaactggctgattagaacctaaaaaataatatttgaaaaatttatgacatataaataagattcaaaaattaagttgctttgtttttatattttaaaaatgactcataatctaatatgaccctttaaaaagttaaaacaaccctgtgaattcactgtgctatactggatgggccttaatgcataatgtaggaagagcagatgtactcaaaagtcagtggtaaatatcagagtaataagtacagtagttctagacatacatgttaaaatgtttaccctaagggagcactcagcaatacttgtcattatagacaaaggcaaataaaatttgatcttatcaaggtaaattaaatgtctagtgaatagggaccttagaattgtatgtatgtttctaggctaatatttgcaagacatgtctaaggtttaaagtttttcctattcccagacaatagtaatatattatctgtaactgtttatacagtgaaagtgaataaaaaccagataaagtcattatttcattttagtatgaaggaaatagtttgtctaagaattacttctccacagacgattgagattttattggcattaaactaagccatattaatgatttgctgtttgtatgaaacaataataaaaattttaattaaaaattctagcacatgaaagtttagtacaagcaagaagctgttgctttgttcacttgtaagcaggtgagatatcaaaaaacaaataaaaaataagattcatttttgtctgaatgagaattaatttattaaatgcattattttatctaatatccccttatatgttcctaaggtatttccaaataccattatgaagctccacctttttataggacttccttttaaataatgtaaagctaaaatcaaatttgaataaaatcataaatacatagaatgcattattgcagtgctaaaaatgcatagcagttttgtgtatgtatgtgtgtgtgtgagtatgttttccttcctctataattatccttgtctgtcagcttagtctatctgaacacacaagctccctgttgcagcacgaaatcttaatctggtgtcttggggctcttatcactggcaattctgcagatcatgttcccagacccagccttgggtcactgttccctccagtgtctccagaagcagctcagtggatgaaacagcctctcagtagtcacaagattctagcttaattttttcaaggtttagaatttatactatactaggtccagcagaatgaacaccatgaaagctctgaacaaaaaattggaagccttggttatatttcctagtttctgtcctggaacccaacaggcctgcgggctcagcctcaaacataactaatttttttactctgattcggatccatggtgattcacaacttgtttttaaacacagttaactactttttcctattttatcaaagttttccataatttggcaagtgaaggaatgaaagattgtctaacacgtgaaataacagcaccaacttgacaagatatttgcaggccaggaaaaaaaaaagcataagcagagtatgaatcaaatgtgaagaggaaatggagaaaatagaggaaagtgattaacattgtttaaatataaaggtgtaagaaaagggaatttcatattcagaaataactctcccttagggtaatggatttcaatagaaagcaagtgcagagaaattgaaagcagctccgtgaaaattcaggaaaatatccttaattcaattaggaactgactgtcattacagctttctatcagctctggacagagcctgatgggcacatgcatcagcctaatagtttagttcttagttaaaacaaagttaaaaaaataaatatttagttggaaaggaaacctttttctataaatttgttccataaacgttcatattcctttaaatttgaaataactgaaataaaaggtgaatagtctacataaaatgcaacattataatttaccttcacagatactgttttgttttggatatttttgcaacaacacaactaagttgaaaggataatttccagctttactgaggtacaattaacaaataaaaatcatatattttaaggagtactatgtgataatttggtgtgcatatgcattgtgtaaagattacaacaattaaattaacacgttcatcaccacacatcgttactcttgtgtgtgtggagggtgaggacacttaagatctactctttttgcagatttcaagtaaagagtacagtattgttacctataaaaattagatccccagaactgattcatcttataactgaaagttcctactttttgagcaacatgtgagatcatgtagtatttgtttttctgcatctggcttttccatttagcacagtgttctccaggttcatccaagttgtcacaaatggcaggatttccttcttttaaatgtccgaataatattaaattatatatgtatatctgtacagtatatattagtttggtgaaaatgtaattgctgtttttgccattactttaatatatgtgtatatgtattgtatatatgtgtatatttgtgcatatgtacatatatatgtatacacacaccatattttcttcatccatcaatgaacacttaggttgtttccgtatcttagctactgtgaatagatcattcttttctgtttagatgacacttgcccttctactcactaattcagtaaccttttttgggaggtaacttaacaatttgccctgcttgcatcatatgtaaaataggggtggtaaaaatagttcgcttacagcattgttgtagtaattaagtaacttactatgtggaaatgttcagagctacacataatgatgaataagtatcttcttttgttaacctttgattgcaaagtttgatctaacatgttttgtttgatggtcaggaccacaaaaccccctcacaccttacacatatttattacaaaagtactcaggagagatcagtcaactccgatgacaagtgatttttgtttctattctgaggttttgttgcctgttgaaagaatgtgaccaggtgtatttcctaagatatataaggagtcacatataaaattccgagattccaggtaccataattcaaatttagaccaatgtcatagcattgcttctactctggtgccaaataagcttcccagatggcccatccatgaacctggctctgatttttaatagagttagtgtgatattttggaaagaaaattggatttggagttaagcaaccaagtttgaaccctaactcagaaattacttagctgtctaaatttgggacaagttacttaacttggctgagtttccatcaggataaaggtgataaaacaagaatcttgtaatgattctgaaacttacagggaacataagtagggcaaataactcagtgcttggtctttctatttaccatacttatgtttctctctcttctttttgatatcagtgacttggtttttcttgaagaagccacatcttcctcactccctgtttaggcagtgcaagggatctatagcaatcttgagcaatgccacatgcctaggccaccagctttatgagcactctccctgtgacttttgcaagaactagcggaggagacattctgtatgccatggagtggcccagctagtggggaggccctattttccaccactctgaaaatttgtctgaaaatgaaatcaactcaaagaataaaacatatctgagctgcaagagcaagagtgatgccaatcattccagaagacaagtttaccacatggttggaattagtcaataaattcctttttgttagttaaaaaaaagtttctatattttgtaatcagttttagttgcctcttactttttgcaaactgaaatattcctggaaaatatagtagctaatcaatagtggagggatatatttattattagtctatctctcaaatattagagccccaaaaagcagaagccaatatcaatgacctggaccatcagctttttcagggtctcaagcctgctgcctttagactggaacagcaccataagcccttgtgggtctccagcctgctagttcactctgcagccttatcaggctccataatcaagtgagccaattccttgtaataaaaatttgtgtgtgtacacacacacacacacaccccctattagctctgtttggttctatttatctggagaacattgactacgcaaagccctacttctcaaggtacacgtttcattgcaacagaatgagtttccaaaaaatcaggctcttcaattttgcatgccaatataggcctcctaaaaatgaatttttattccattcgtttcaacaactattaaaatcattaatggctttttattgttaatgaaactgcagcatggctaataaaaacttagtagaagaaatttacaatctctagagaaaagacatttactacttattatggatattatactccccaaagaaataggttgaacccctaactcccagcagctcggaatgagatgctgtttaggaatacagccattgcagttaaattaatatgaggtcatattggagtagggtgatctcttgatccaatatgacaagtgtttttataagaaaagtgaaaacaatgtaaagacaaacacaggaggagagatctccattggcaatggaggcagaaaatgaggtgttaacagctgtaagccaaggaactacaaggattgccagcaaaccaccacaatttaggaaacagcaaggaagaattctcccctacaggtttcagaggaagaatggccctgcagacatcttgattttggactctgatgcttcagaactataaaagagcaattttctattgtgttaagccatgtagtttactgtgcattgttatggcagctctgggaaactaatcactgcccaagtaatatttgttcatttcatttttttagattttacatctaaagttactctatttataagaacaggatttggatgaatttctataagttgtggtatattttttaaataaatcttaatttttactactatggggcaaagaataattttatatgaaaccaaagtgaaggtagctgaaagtaatagtagcaatctaaattatcatgtcattttgtatattatctcccaaagaaaaatacatggatgccattttgagagtatagaagtagccaatatagttacctactgactgtcatttcagtcaaaagtaccgggtactaggcttattacctgagtgacaaaataatctgtacaccagacccccatgacacaaaatttacccatatgacaaacctgcacgtgtgttcccaaacctaaaatgaaagttttaaaaaaagtgttctttgtgataaagactataaccaactcaattcaatttattttgatattgagagctttatacaaagtatcaaaatatctaacagagaaataaaacaatgagaactatgttattttattttgaagtaccttacaaggaccaagagaagatccttgtaagataagaaagaaaatcagtatcaaaaattgcttttaaattaaataaatatccttaacattctttctttgcagaaggggcattcgggggaaagtgaacacatttgtacctgtaattaatatatttgaaaggtattaaagaatagttaaataaaatattctgcaagagagaaattctgtttcaaaaatctgacacatctttgtttcctctttttatttcaagccccacatttaattgaagagtatatactattgatttcaaaatatatcaaaattaagccacctctctctgcactccacttctgtgccaagccactattgtctcttatatgagacaacaaccttctggtgtttaagccatccagtttgtagtagttggttacaccagcttcttaatgagttttaacctgaccttcctattttaaaatttctacatctagtaccccaaccccacactgaccctgtttaccctgctctatttttccatagcattcaatataatttgctttttaaatgttaattgcttaatatcttctttcttcaactagaatacaagttgtacaaagtcagatgtttttggtgctttcacagttgtacagcaagcgctttgcctaaagctttatatgaagtaagtgctttgcttaaagcttggtatgaagtaactaagtactcaatatacttgctaaatgaatgaattaattactacaatgtaatatattctacatttcagtttgaataaagaatactgtgagatatttcagtgtcacagtatggtatactggagtgacttgtgaatttgttatcgtaacagttggaaatgaccatgcgatgccattgtgcaggcatatataaaattaaatagattaaggaacaatttggttacaatattttagtaacaaactatcatttctagataataaaagaaggtagaatttctgacaggttatgaagcagctctatagtattatccatcaaggactaacaagtaataactcctcctagtgttagtcaatgctgttctaggatctgaagcgataattataacatgaaatactggtccctgggtccacatgtctcttgatctgtctaagtgaaaaacaattaacaataaagcaaattacaaagcaaataactgtgtgataagaaccaagagaactaaaacaaatacattattacagttcaaaagctggaaaggatgaaaagaagttgatggatgggtacaaatatacacttagaagaaataagacttgatgtttgatagatcagtagggtgactatagctatcattaatcaattaaccattacaaaatagcaagaagagaaaaatataaatattcctagcctaaagaaaagataaatttttaagatgatggatatatcaattgtcctgttctggtaatatgcatgtataaagtcatcacatgtacactggaaatatgtccctgtaatatgtattaatttaaaaaatacaattataaaagctgtaaaaagtcattattgaagaagtgaaatgaaatggatcctgaaaaaaattcctaaaagctatattcaagatacaccagaaggactggttcataattctgtttcatccattgtatagacttagaatcattcacagaagcaaaggtatacaagtcagaaatggcactataaattttatatgtacagaaaaagattaaaattggagaaatgtaaatttttttttttttttttgagacagagtctcactgtcgcccaggttggagtgcagtggcacgacctcggctcactgcaagctccgcccccaggggttcacgccattctcctgtctcagcctccagagtagctgggactgcaggcgcccgccacctcgcccggctaattttttgtatttttagtagagacggggtttcactgtgttagccaggatggtctcgatctcctgacctcgtgatcctcccgcctcggcctcccaaagtgctgggattacaggcatgagccaccgcgcccggctggagaaatgtaaattttgaaagcataatgtatagctgtagcttaacaaatagtggcacatttatattgaccagatgaaattgaggtaatataaaaatatacacatgagatattaggttggtgcaaaagtaattgcagtttttgccattgaaagtaatggcaaaaggccgggcaccgtggctcacgcctataatcccagtactttgggaagtcgaggagggcagatcacgaggtcaggagatcaagaccatcctggctaacactgtgaaaccctgtctctgctaaaaatacaaaaaattagccaggtgtggtggcgggcgcctgtagtgccagctactgcggaggctgaggcaggagaatgacgtgaacccaggaggcggacttgtagtgagctgtgattgcgccactgcactccagcctgggcgacagcgagactccgtctcaaaaaaaaaaacaagaaagtaatggcaaaacacccgcattacttttgcaccaacttaatatattattatataaatatgtgcctgtgtattctgatccaaactcaacagcaaagaaaaaatttgatatgtattttgattcatcgagaccagtaagtggtcaaaatttactttgtgagtgtgtatgatttcattaacatgaaatagtatttatttattttaattatatattttaaaaatttttgtatttttagagaaaggatctcactctgttgcgcaggctggagtgcagtggtgtgatcatagctcactgcagcctcaaactcctgggctcaaaggatactcccgcctcagcttccccattatctaggacttcaggcacctgccaccacatctagctacatttttttggcgggggaggtgggatctcagtatgttgcctaagttgatcttaaactcttaactaacctcaagcaatcttcccattttggcctcccaaagtgctggtattattaaaggcataagccaccatgcctgacctttagtattggtattactattttttaaaataattttaacttttattttagattcagggaacacatgtgcaggtttgttacatgggtatattgcatgatgctgagatttgggatatgagggatcctggcacacaggtagtgagcataggacccaatagttagtttttcaactttttcactgtctccccctctcccatgtagttgtccccagtatctattgttgcaatctttgtgtccatgagtacttaatattcagctcccacttataagcgagaacacgtggtatttggttttctgatctgtattaagcaatttatgataacgacctctagctgcacccatgttgctgcaaaagaaataatttcatttttaaggctgggtggtattcaatgatgtatatgcactacatttttattatctaatctactgctgatgggcacctgggttgattccatgtttttgcaattgtgaataatgctgcaatgaacatgtgagtgcatgtgtatttttggtagaatgatttattttattttttttgatatatacccagtaatggggttgccgggttgaatggtcattctaaatcctttgagaaatctcaaaactgatttccacagtggctggactaatttacattcctaccaacggtgtataagtcttctcttttctctgcaacctcacaggcatatgatattttttgactttttaataatagccaatctgataggtgtgagatggcattccattgtggttttgatttgcatttctttgatgattactgatatggagcattttttcatatgtttgctcatcacttgtatgtcttcttgtgagaactgtctgttcttctcttgagtatatacccaaagaaaataaaaatcaccattttgtaaaacatatctgccctcccatgtttattcagcattattcacaataaccaaaatacagaaggaacttaggccgggcgcagtggctcatgcctgtaatcccagcacttcagaaggctgaggcgggcgcatcacctgaggtcaggagttcgagaccagttttgccaacatggtgaaaccccgtctctactaaaaatacaaaaattagccaggcgtgttggtatgcgcctgtaatcccagatacccaaggggctgaggcagggaatcgcttgaacccgggaggcagaggttgcagtgagcagagatcacaccattgcactccagcctgggggacaagagtgagacttctactcaaaaaaaaaaaaaaaaaaaagaagcaacttaaatgtcaattgacaaaatatgtgtaaagtaactctggtgtgtgtgtgtgtgtgtgtgtgtgtgtgtgtgtgtgtatgcatataatcatatatataaaatgactattattcagcctttaaaaaggagatcctgacattggccacaaaatggataaacctggaggacattatgctaagtaagccaaacacagaaagaaaaatattgcattatctcatatgtggaatctatttcttttaaaagggcaaatatacagacacagaataaaacagtggtaaccagggattgaatggagaaggaaagtggaggatgtatgtcaaaggatacaaagttgcagatacataggatgaagaaggctagagatcaacatgaagatgtgaaaaagactatagttaataatattgtagttttcgggatctttgctaaatgaatagattttagccgttcttagcacacaaaaaaataaatagctatgtgagatgatagatattttaatttgctttattatactgaccattttactatgtgtatctcacatcgtgttgcatacaccttaaatatccacaacacgatttacttaacaaataaaataaaccaatgtttattcaaaaaccaaaaaagaaaatagacatgaaaactccattttatgtatttaacagcagattagacacaggtgaagagaaaattaatcagtagaaagataggtcaaaagtaaacattcaggtagaagcataagcaattaaaagaaggaaaacgggccaagcgtggtgacttatgcttgtaattccaatgctttgggaaggctaagacgggcagattgcctgaggcccagagtttgagacaagcctggccaacactgtgaaacccctcctctactaaaaacacacacaaaaattttgctcagcatgagtcccaagtagctgggagtacaggcatgtgccaccatgcccagctattttttcttgtgaagcacgagaatttcttgattctgggaggcggaagttgcactgagtcgaaatggtgcccctgcactccagactcggggacagatggagaccatgtctcaaaaataaataaataaagtaaataacaaaagaaggaaaatgttgactagagggtaagaacgcatgtaacatggtgaaagtttctaacatatatttaattagaggaaaagagttgagaattattaggaatcaattatcaaataggtcatgtctgagaactggcaaagcctggaagtgacattatgccacagacataaaaataataaaatcttaagtgggggaaactaaaaaataccagaccacaaaacatcaaaaagtataaaagaattgttgaaaaccaaagatgcagagaaaaacttaaaaacagtcagaagtcaagatgagagtagagatagtgtgtcccgaattggtgggttcttggtctcggtgacttcatgaatgaagccgcggaccctcgcagtgttaacagttcttaaagatggtcaggagtttgttccttcagatgttcagatgtgtccggagttttttccttccgtagtttgtggtctcgctgacttcaagagtgaagccgcagaccttcgcggtgagtgttacagctcttaaaggtggcgcatctggagttgtccgttccttctggtgggttcatggtctccctggccacaggagtgaagctgcagaccttcggggtgagtgttacagctcataaagggggcatggacccaaaaagtcaacagcagcaagatttattgcaaacagcaaaagaagaaagctaccacagcatggaaggtgacccgaggggattgtgctgctgcctcggtggcctgcttttattcccttatatggccccacccgcatcctgctgattggtctattttacagagagctgatcggtccattttgacagagtgctgattagtgcgtttacaaacctttagctagacacagagtgccaactggtgcgtttagtaacctttagccagacagcaaagttctccaggttcccacccaacccagaagcccagccggcttcacctctcaatagcgctcgcccaggattttactgcggcacctagtccaggcactctggcagcccagagggagctcgtcccccaatcaagcccagcaggcgccagcctgccgcgccgagtgcagggcccgctgagcctgggcccacccggaacccgcgccggcctgcaagcgcctcgcgcagccatggatcctgcccgcgcctctccccacacacctccccgccagcagagggagccggctcaggcctcggccagccccagagaggggcccccacagcacagcgacgggtcgaagggctcctggaacgcggccagagcggacgcagaggccaaggaggcgccgagagcccagagcgagcaagggctgctagcacgttttcacctctcaataggaggaagtaaaggaaattttacctacaaaatagcaatactaagctttacagctgacattacaacagcaacaagaaaaggtaaattataatggaaagtattttcaaatagttaaaggtaattaactgcaaatcacttggaattctctaccctctaaaaaataatgtcttcattactaacttccactgtcattggagttaattattcatgttccctctatgtttaatgtatacatatttattcagctagtttgtctatactttccattcaccatgacaaacaggttttgtgtttatatttggtttgatcatctatcacaagggctaccttatcataggccttaataaatgttgttaatcctatgtataagtgcccaagaatctcttgacaatagtccctcctgaaagttaatcttaaaactcttctttaaataggactaaaatggaaatactgattacctttaaggtgaatctatttttttcatattaaaaagatgtaaagtaatttaaatgaatgcacatgtcaaaggcatgtctttcagtgactcacatgattattggtccaattgatatggctccattgtctggggaaacacccagggtttttggtctcgtgctgagaacattagtgacatggacacacgtggagcggattaaggactggaaagtttagtaagcaagaaaaagaaaagaacagttcttccttacaaagggaggagggctccaaacagaataaccctgctggggcggaaggcagtaggttacactgggaggcttgaggaggtggcgtctgatttgcatagggcccaagggattgacttgaccagttgtgtcattcaaatagcccccccaaaaaagtccctcccaccctaactttgattatgtaaatgtgactacttggctggtcgccatgatacctgtacacatggcctctacctggctcactgtcatgatgtctgcacacgtggcaacaaagaaaaagtagcgggaaccgccatattgggtgtacttggctctgagccacctgcgtttacatatgcaagcctgtgacttgcatatcgatgcttgcaggtctggtttttcaggctgctttctgtcagaaaagaaatgttttgggggctgctttattattaaaaaaaaagccttaccgaggactcttttaccctttctagctgcctaaaataatttctttctttatttttctttttttttttttcccgagacggagtcttgctctgtggcccaggctggagtgcagttgcacgatctcggctcactgcaagctccacctcccaggttcacgccattctcctgcctcagcctcccgagtagctgggattacaggcgcctgccaccacgcccggctaattttttgtatttttagtagagacggggtttcaccgtgttagccaggatggtctcgatctcctgacctcgtgatccacccgcctcggcctcccaaagtgctgggattacaggcgtgagccaccgcgcccggccaaaataatttcttaataactcctgtaatacaatcctaggaacataaaaagtacctgaagtttagtggcgccattcagaaatctaattttcaggaagtagcactgtgtgcgtggccgtgtgttatgcttcttcaattagtccctttctttaagttcatcagttcacattctctacttttctaatataatccataaaatcaaattttatcagttaccatagatatctttctaaaatataactttggtttcttttctttcttttgaaataaaatgcattttactttttatatttttattttttaacttttataatgatataaatgtatacttacaagagttgcagaaataacgcagaacccatttacctatccagcttcccaagtggcgtttacttatataatcaaaaagtgcaattataaaaaatagttgacattaatgcaatactattagccaatctagggattttattcaacttttattctttgtatcactaatattccttttcaattccagaatccaattcaggctcacacattgaatttagttggcatatttctatagtttcctctaatatggagtattttctctgtctgtcttgactttgaaactattgaagattactggtcaatcattttgtagaatacatatcaatttgcattgtctaatatacactacagaaattatgctgtgttattattgcattaggaggtatctgatgttgataatattactgggatatttataagagagaactatgtgtccaaaatatgaggtacatgaataaaagcatttaggaataatctctgcaagcttctgtactccatcaaatttaagacgtattgattataagatgcttcattgaatttacctgcaatatttagaagaaaaaaataatgctttcatgaaaagtacaatgcaataactttctaacaactagaaatgttacaaaagtcgaaaattttagtttgtttttatttaaataatagaagtgctgataacatgaacagttattgaccaggttcataaagagtagtctgacagtagtatatccccacaactgccaccagaccagctgtgattggtattcccttctcaggttcagagatgttaaaatgggcaggggggaagaggagaaataagtattttagtataaaaaaaaaaagaatagattaacacccttcagcaatggtaagaagtcacacttcagattgtatacagtgaaaactcctccttttttttttgttatggtaggggaataacatgatcataacatgttgttgatattattactgggatgcttataagagaggataatatatccagaatatgaggacggttttatgcactgggatatattaccttcccccaacaccaggaatgacaataagggaaaaagtttctgtttctttgagtttggggatcatattgctaagaaaagaaaagaaaaacaggacatctatttatatgcctatgcttacatagcactataaccatagtgctaagttaatagtctcctgctttaatgtaaacattgggaaaagcttaaaacaatttagaaaacaaatataaagatcctaaagccatgattttccaagctggaggtcactttcccatttcacagcctggtgtttcatggaaatgctttatattctccacccaatgattaatgaatacaattacaacagtaggaaatttaacaagacaataggaaacaaacttacaattatgagtattcatttaccagagtggcagatttttactgtgtaaagtaaaaaagtgcatttccaaaaatgtgtagtatggcatagaaaacctgaattaattgttttaattagagaatcaatctagcagcttaggttgaagaagcaaagccatttcattgtatctgcatagacccacctctaagggaactgcctgtgacaatcctttatgcctattgtcctggcataattattaataccattctctttcactgtcaccatttttccagtttgacaataagttatacgcccattgaactgataactgaatttaagttgtaagtaatgtagaatatgcaatatcaaaaatacatttattttgacattaatttgcataagtgaaaagcaagaacctaaaattataaatgttatataataaactcccaaaacttatttttaatttcaaaaatgcatttatactcttgagtttcttacattacttttattttccatgcttattcgaggtatatgggatgcccaggaatatacctgtcaaatagatataaaaacatagagaatctggagcagttaggagcatgggatttcccatagcatttgaatcctggctctgtagttatcactaagtaaccttgcagactcactctaagccttctgtgtctcagtttttaaatctctaaatcagaggtcattgtaacatttaccttaaagtattgctgtaagaactgaatgagtgataaagctctatataaattagagaatgtggctggcattttgtaagcattacattacgtaagtacagatagcccccaacttaactatagttcaatttatgtttaattaaaggatactgtgaaagcaatatgtatttagtaaaactatacttgaaattttatattttgatcttttcccaggctagtgatatgcagtatgatgctctctccagatgctaggcagtcagccagcaaatcagtaggataaacaaccgacgttcttcagcgtaccgtgttgtcagatgattctgcccagctgcaggctaatgtaagtgtcctgaggatgttcaaggtaggctagtctatgctatgattgatgttcagtagtttaggtatagtaaatgcactttcaacttagaatactttcaatttatcatgagtttatagggacataaccctatcatgagttgaggagcgtctatatttagatgaatagatagataaagaggaattgggggattattgcctcttatacaagttcaaattcacttgggaaaatgggggaagttgatgggtttttaagtacaacactctgagagaacacagaaagaataagcaagaaacttgacccaaaaaagagatagtgaatctttaacacacttcaggactcagggcaccacccaggtctaaggtaacttgcaggaatatgacatgggtataactttcaagagctttgaatttatttcttaaaagagctcaacataaaatcaaagtgagagcaagaatattttagcttccttctctgttctctttatcttttactccatgtttcatatattaacaaaccctgttgatactaactttaaaatattttgaaaatgtgtccatatatgattactttcatttatactacatactccatgacatcatcacatttatgtcaattgtctcctaatttgtctccccgttctgcccttgctctctattcagtatattttctccaagtaacaagaaatcttcagttaaggcagaagtcatgtctctcaaaaccatccattggtttcctgtttcagtcaccataacagtcaaagtccttagaattgtatatgaagcactctgtgcttacctctttattacacttttttttgtttcttttttaaaaattttttttaacttctttatttcaataggtgattggggaacaggtggtgtttgtttacatgaataagttctttagtgctgatttccgagatttcagtgcacccatcacccaagcagtgtacactgtactcaatgtgtggtcttctatccctcagccctactcccaccctttcccccaagtccccaacgtccatcgtatcattcttatgcctttgcatcctcatagcttagctcccacttgtaagtgagaacatacaaggtttgattttccattccttcacttagaacaatagtctccaattccatccaggatactgtaaatgccattatttcgttcctttttatggctaagtagtagtccatggtgtgattgatatatatatatatatatatatatatatatatatatatatatatatatatatcacattttcttatctactcattgatttatgggcttttagtcgggttccatatttttgcaattgcaaattttgttgctgtaaacatgcatgtgcatgtatcttttttcatatgatgacttctttttctctgggtagatacccagtagtgggattgctggattaaatggtagatctatgtttagttatttagggactccccacactgttactcatagtggtcgtgttttagtttcagcaatgcaccaagattgtcttgtgctcagacaaccaagcagtctcttgttgtctgacgtaatacctggagttctttgtcctacctccaagaacattaaggagagcagagacaaaagtgaggttcgagcaaaagttttgataagcaaaagaagaaagctctctgccagcggaggggggagccggaagggggtgccccctctgaggctagggtccagggtttttatggactgggaaggggaataaatgtgctcagtccatagactgtcttagagaatgcgtgattcagcttggcccaggaccttggtctgggaccaattagaaagcttggcccaggaccaatcaggggctgaagcgatgatgtatggaggctactcagcttgcctcaggacctgtcaggagctgaagtaaaagcttgtcctgagaccttggtccaggaccaatcaggggctgaagcgatgattcatagaggccgggctcacaatcaaaaaaaagaaaggagagtgcccactggaacccactggagcccactgtggccatgcccacaaaaagagaagaaactttttcctgggagcccactgattatacaagggacaaaggcatttctacgctgggccttgttttttttttttttaatctgagtgagccagaggtttgtgcaagtgtttatccaaatgggccggaggtttttctatctgtgcagccgtagccatgtctctaggcatagcaccatgtgctagttcccttatggtgtctgcagcttgatttttttcccgggctgctttttatgttatgtgaggatgaggcactgacctatgggccaggggctctctggggacccttctttgctatctacctaaggcaagctaactcctttcagttgtactagtttacattcccagcaacattgtaaacgtcttcccttttgatcacatctgtgccaacatcgatttttttttaattttttgattatagccattcgtacaggagtaaggtggtatcgcattgtggttttgatttgaatttccctgagaattagtgatactgaacattttcccatatgcttgttggacatttgtgtatcttcttttgaaaaatgtctattcatgtccttgcctactttttgatgagattgtttgttttgatgatttgtttgagttctttgtagattctggatgttagtcctttgtcagatgtatagattgtgaagattattctcccactctgtaggttgtgtgttaactctgctgattatttctgttattctgcagaagctttttagtttaatcaagtcccatctatttatctttgtttttgttgcatttgcttttaggttctgggtcataaaatcttggcctaagccaaggtctagaagggtttttctgatgttatcttctagaatgtttatggtttcaggtcttagatttaagtctttgatcaattttgagttgagagatgaggatccagtttcattctacatgtagcttgccaattatcccagcatcatttgttgaatagagtgtcctttctccactttatgtttttgttttctttgttgaagatctgttggctgtatttggcattgtttctgggttctttattctgttccattggactatgtgtctatttttataccaataccatgatgttttggtgactatggccttatagtatagttttaagttgggtagtgtgatgcctccagatttattctttttggttagtcttgctttggctatgtgggctatttttggttccatatgaattttaggattgttttttctagttctgcaagaatggtggtggcattttgatgagaattgcattgaatttgtagattgcttttgacaatatggccattttcacaatattgattctacccatccatgaacataggatgtgtttccatttgtttgtgtcatctataatttctttcagcaatgttttgtagtttgccttgtagagaggtctttcgcctcctttgttgggtatattcctaggtatttaatttaatttaatttaattttttgcagctattgtaaaagaggttgagttattcatttgattctcagcttgctcactgtaggcgtatagcagaactactgatttgtgtacattaattttgtatcctgaaactttcctgagttcatttaccagctttaggagctttttggatgagtctttagggttttctaggtatgtgatcataaccaacagcaaacagcgacagtttaacttcctctttattatactttctagtattctctcctttccttattttcatagaagctgcaatggttccatgcttgtacccaacagacacatgggtgactcatggctttgctcttcttccttatacatgaaaactctccccccaacatagccatgcggctccaaggtacacctcctcaggatctttgctaaactttcttctttagtaaacccttttcttgaccctgtaagataagaagttctcatctgttatggtctagattgacaacatatcaaggcatgtataataggtaaatgcttctcaaacagcctgaggcttgtttaatttgggctgtgtttttcctgtgattaatatgtatttcattcaactatatatgaatatcttatataaaacagtataatgtataacaattctgaggacagtgcttttatggaataaaacattcaatttttttagttttctgagcctaacttggtatttggagttagaaaagaagtggaggtattccatctttttttgtttgttttgttttgtgagacagagtttcgctctttcacccaggatagagtgcagtggcacgatcttggctcactgcaacgtcctccttctggtttcaagcgattctcctgcctcagcttcccggctgggattacaggtgcccaccaccacgcctggccaatttttatatctttagtagagacgcagtttcaccatgttggccaggctggtctcgaactcctgacctcatgatctgcctgtctcggcctcccaaagtgctgagattacaggcgtgagccaccgcactgggccagaggcattccatcatttaggggtttctcttcttcaagtatacttcccttcctggtagccctctacaaagagtcagacgtcctaaagaatcattttctcctttccaaaaacaactcgtctctagaacacttggtcagtgcccacttagtatacagcatattgtagattgagttcataaacctgctttgccagaatgtgctgtcagcattctttgcatcagaagaccaaacttagatttgttatgttcggaaagagaataatatatcataaatttaaaatactgataattctctatagaacatgtttatgtacaaaatataggcaaaattcttatctgttaaaagggtgattactatatgatcacaatattcttcgataatatgatcagatttgtcttctcaaaatgtcataaagtaatatttcaaaaagcattctcaaaacaggtaggccacagtctgctaaataaaaggaaaagaaaccagtgtatattcattaacaagtaggtattccttgaatgaatatatttttggctttttactctttttagtgttgcttttgcttctctggacacttccccctataaaatgattagttgccatgctcagatgtcatgtgttgaatctgagacaagagttgccaaagtatattgaaatagaatcagacattcaaaaagaccagccacctctttagtgatagctccaagacactattattttgatactgaattttctgcatccacccaagataaaaatgtttaaacctatgttaataatgtaacttaaacattaagaattgttttggaatgccaattcatctcctttatgtgcatcgaagagattaagttacctaagatgctttattttggaggatacaaatatgctgattgcagcagaatctgccctggaaagaatgtaaataacatagtgaatggtgaactcagtgcactgcatttatcttctagattcattatcaaagtgtcctttgagtttaacttttttcatttaaaaaatgaagaccaatacactaaggaagcattttgttttcagaagtgatacattggacaattcttatgtaggaattaattaagtaaaatgtcttcaagtgaacaattggttcaatcaccagatgaattcagaaatgtttctctgaaggcagacctattatattttcacctttaggcaccagggggtaacatgtcttattaatgcctatattaaaattgatctgcttccataggtatagtaccaaatagacagctcatcaaataaaatgaatgcttttaaaaggattttatacatagttatgcattttcaaaaaacaaatttccattttgatgcaggaaaatgaggaaatttaaatacactgaatcattttgctagctagaagacagcaatttaaatcattattattgggaaaataccagatatgattatattataaaaagctacttagcaaatagcatcagttatacattataaggatgaattttatgtgattttccttatagagatcgtgctttttttctatagataaatgcaatattaaggttggaaatttgacttacccagcatgtattgtttaaagagatagattcgtgcgttccaaatccaatttaaataatgcataaattgtaacactaacagataagcttggttttcctaaaatatcaggatcaagcagacaaaccctgtctggttgtaacttgatcagtcatctctatgctgtggcttgtattcatctgctggagacatctatgtgatatcctcaaataattacagacgtttgtagaaattacatagactgtacaccagaaaaaggcagtgttcataatttgttaactgacgaataagataaaatctcagactcttcatcgttcttgacaattttggcagtggacatgtgatagtgacagatgtgttctgaagaagagaactaaggtccttgaggacggattgagaggatttgagggaagcctgtgtaagttatggtgaaaatgacaaattgtatggtcaacagctctataagtggtcctccattttattgcctataatcaaggatgaattggatgggtgattgcagaataaaatactgaatagcatctggttattactaactcctctggggagggagagttactcattaactggcaggcagcctctggtccacctcactttaacaactagtattaaatctgtgcaaggtggatagaaaatctaaattcttacaaggtggatagaaaatctaaatccattactgggtatatacccaaaggactataaatcatgctgctataaagacacatgcacacgtatgtttattgcggcactattcacaatagcaaagacttggaaccaacccaaatgtccaacaatgatagactgcattaagaaaatgtggcacatatacaccatggaatactatgcagtcataaaaaaggatgagttcatgtcctttgtagggacatggatgaaattggaaatcatcattctcagtaaactatcgcaaggacaaaaaaccaaacaccacatgttctcactcgtaggtgggaattgaacagtgagaacacatggacacaggaaggggaacatcacactctggggactgttgtggggtggggggagggggagggatagcattaggagatatacctaatgctaaatgacgagttaatgagtgcagcacagcagcatggcacatgtatacatatgtaactaacctgcacattgtgcacatgtaccctaaaacttaaagtataataataataaaataaaataaaaaaagaaaatctaaattcttttcagatgcagtttacagagatgcacaccaactctggacagaaaaagaagtaatttacaactactctgtgcagaaaacaggcaaattattaaatttccactggttctctttggaaaagtaaagggtgtaatgcttataaaggaaaaatggcaatagctgggacatcttagggcttagaccttcctacacttcttagagttgttgggatgagacagtaaaagatctcagactgcctgtacagtaggtcttaactgtaataatggatctttggctctctaggagatagttccttcaaagagatgaattcccatgggaaaaaaatatcaatgaaacgttaactagtaccaaggtttttatagccttagattgggtttacgtagctgtgacttcatcccgctgcagaatgtgaaacaaacaatctaggtatatttttttgtgtttatccttgtgtgccatggaaaacttcactagatactatgtagagaactgggaagaattatagagatgttatcttagtaatggtgcaggagatgctgtggatttaggtgtactccttaaaggagtcatggttgtgtgagtcaaacttgaatcattcagagggagaacatccactggccccaacccagaaagcagtgtgactggcactgttgagagaagggattctcaaaactgccatagatagtgtcagtcatgatattctcacagcctgatggaccagacacatttaaagtctgtttgattgaggcattggaaactgaaagcaaatgtaccttgcctgttagctgcaagccactctctactgatgtgatcatcttctaccctagcctcagatgctttaagaaagatgaatagaactgggaccaagatgcctctgtctccaaagaaaaattaaaatgacatgcacacattcaagtttgcagggaaactttgaccctggaatctagaaccctgtaggtaagctacagcagaccactgaatgtgctacactgtgaaacatttcagtgaattatgtatgagtatttatgcaaatgcatgtctggggcaatatataatatagcccattttccatgctggttatgtgacgtgttgagtacaagttgtaggaaggacctttcaaagcttctttctaccctaattatcttattaactttgcctcagttcccaattcctaagcaccatgatacctatcttcctttaatctttcttctcactatgtattttccaggattgagactatgttataattctctagtttcaaccctttcttaagtgatgtaggtatttttcatggcattttgcctgtccaagtatttagctgatgcttaacccattgacttgacatatccttgctcacataaagatatagacagagtcttctactactacccgtctctttccccacggaacagttcctctgtacatccccttaggtaaaatgatcaaaatatgagaaggagagacaaagtgtggttagcatgagtaaaccacattaatacagagagaacatttgactgcgtcaattttgctctatatgctttttgtaagtatatttaccagccttgttgagaccaaaatttgggccaaaaatataagtacctggctgttaaagctgagagggaactatgtagcataattataacactctgaaaagaaaaaatttgaagatgctcattttgattatgtttaaaaactccaatcatggatataaaattcctaatttgcctaccggatgaacaagtagtacatccttgtatttgtatagcatctgtttccatggaatataagtagtaaatgttagctacagaatatatatatgcagatttgagtataaaaaatatcttttacaaataacattttatttccattttagtaatagccccaaactcagtcagaagtgcaacagtattttggctgagggcctgtttgttgtaggaaaacagggctattttcctcctattcataacatgctttttcttctattcaattcacagtgtgtttcatttttaggaaaattcattttggagaattttccttattctccattgcttcactatatcaatctatgtgaatgacattgatttcttagggggaaacacttcccatcaaggtacatttggtttacacataaccagcagaagcagaaaggaaaaaaaaacagtctgatgatatttagaagtaaacaaactttacttaatttacaggaacccctacttagtttaatgtgacagacaataatgaggaaaaatattcttgttcattgtcagctcgtttagatgtatctgcgttgaatttcagaaatgaacatactttaggctctaagtgtaaaatgtgttgaatgcgtcgtctggatgcagtttcttcagtaaattccctagaaaccagaagaggctcttcctcagattggcttctaatagtgaaggatttttttttaatgtacacgctttcattaaacttcattttttttttttttttttttttttgagacggaatctcgctctgtcgcccaggctggagtgcagtggcgcgatctcggctcactgcaagctccgcctcccgggttcacgccattctcctgcctcggcctcccaagtagctgggactacaggcgcccgccactacgcccggctaattttttgtatttttagtagagacggggtttcaccatattagccaggatggtctcgatctcctgacctcgtgatccgcccgcctcggcctcccaaagtgctgggattacaggcgtgagccaccgcgcccggcctaaacttcatttttaatggcccgcataagtgactctttcttcccagaccattaaaaatagtaataatagggaaatagaagcaagaaaggaggtcattcataagttaaaaattaaataaaaatgaaatacatccctgaaaaaaaaatgctgggaaacacagagactttgaagactaaaaaaaaaacagcttcctctttctcttgaagtattatctcttgaatttgcctaccattcatctgatagcacccaaggatttttttctaaaatatgaaagtttcagtagtattgaagcactaccctaactctcaatgttttagaaaataaacgaggattgatttcttcttctaagttaccttaaaaaaaagaaaaattgataaaccaagaggattgagttgaggcataaagagatttcaagaaacactaactcagtcttaccagagtcattagcagatttcttctttttttttttttaatttgggtaactgcttgtccctggtagagttgggtacagctacattctattgcaacaacaaatgcaaggacaaacatggtgattaaggtaaaaacatagaactcagagtttgctggtgcattgtcttcacagagcaatagttactacaaacctatcaccatcggttatatcatcaaaagatcacaagtgattacaggtaaagttctcatcgataaaggcaataacatgagttcaaatatgggtcagatatcagagagattccatatcaacaaaaaaaaataatatgtggtgactttagaatatgattgcaaattacttgacagtcttctcattaagactgtcatctcctaaaatctggtgggctagtactatttcaaccatttgagtataactgaagttatgccggatgattgttttagttgactatggtattgccataatataataccacagagtggatggcttaaacaacagaaatttattttttcttttagttctggaggctagaactccaaaataagttgccagcagatttggcttttccagaggtttctctccttggttgcagacagctgcttctttctttctgtgtctttctttggcctttccttggtatttgtccttccctagtgtctcttcttcctataaagacatcactcatagtggattaggaccccaccattaggttctggtttaaccttaattacttctttaaaggtgctatttccaaatgcagtcatattgagtgttagggcttcaacatataaattggttgggggcagagaggtgcacttcagctcttaacaatgacttttgaagctaggttataacagattgcacgacctccaattttaatgctggaaaatttaatttcatagccttgagttgtcatttaaaatattaaagtaccttgagactacatgctgtgaaaaaacaaaagttgtctgtggggggcaatgcagagagcagccattccatgttttaaatgagacttgaagtatacatacagatacatagataggttccatggatgtgaatatgttgcatcatcaagttattgactttttactttctaccccttgggactatagttgcagtgtctggatcagagaataatgtaatattgaatttgaaagtgaatgtacgaagaaatgaacatgtgaatgctggaatgtcccaagacttggttctcagtctcttctcaatgtacaagtgtatctcattattattcccagttatttaagttgtggcagattacataactggaggcaattaagccaaatttgaacacatctgtaggatctcaaagctcactgtctaatgcatgtatcgataatctctcattttcaagtatatctccaaatggacatataaaaataatatatttatgtaactactgtaaaatatatgtgacttttggaagcaataaggatgatcagaaaacacagcttcaagtagctccaattgcaagctttaccacatatgatctttgtggctttgagcttctacagacattgcttctttaataggcaaaatgagactattaataccttcctggaagattggttaaaaaagttaaatgataaacggattcaatatatgagaaaacatcctagagtgtgttaagtaccatgcacatacactatatttttattattttaagaatataaatgcagggccaggtgccagtggctcaagcctgtaatcccagcactttgggaggttgagagaggtggatcacttgaggccaggagtttgagaccagcctggccaacatagtgaaaccctgtctcttctaaaaatacaaaaattagctgggcatgatggcaggggcttgtaatcccagctagttgggaggctgaggagggagaatcgcttgaacccgggagggagaggttgcagggagccaagatcataccactgcactccagcctgtgtgacagagcaagactgcatctacaaaaagaaaaaaaaaaaaagaaaaaagaatataaatgtagtataaatttgttgattagttgttggaatgtgcaagcaaataaaatcggttcgtaaatggctttcagtgactctcaacacaccttgaaaggtatacatgatttatgtagcatgcttcctacttgattaaaatttaattaatcagaaataatgaaaaacatttcatataatgtatatatgctatatgtaacatatagcatttttgttgtaacatttatatttattgaagaaatataatttgaactaacttcaaaagtattttaagttgctaaggtatttcttcattatttaaatgtataggaaccacagaaaaaatattggatagtatgttgtttggcttgctttaatctttgtgaaaattcccaggtattcttttttaatatggctaggtttgattattttgcttgcaaaattttttcattataatcagttccaccttttctgtatcctgacatatggtaaataaaatattgtttttaccaaaataggcatataaaatagatataaaagagtaaagactagtaacataattgtctttctctccaattaaaatttgtaaaattaaatcatcatagaatttctaagcacaagctcatatttcatttattttatgaattacaatttacggagtactatacatgtgcaactttgcctatttaaaagcaggtgatttctatgcgctgtcatattaaaattcatatttcttaacctcatttaataaaaagcattctatgtgatgtaagtgaatctttaaatagcacaacatattacaaggttaccaatgccaaacatttagggtcaggagtgcaacacaacatttcctgatggaataaagtaagagaaaagtcttcttttattttctatctctgtatttttttaaatctagaataaggatttattttattccttaacactcattaagaataatgggcttagccaaaattgcaagaacataaaggagtcaaaattagttacatgtaaagcattcatcttccttaaaacactttcagaaggtcaatttcaatctataaaaaccagttaaagattattcaactatgtataacgacttaccctagagatcaattcacttaaaaaaaattgtcttttgccgggaacagtggcaacacatgtaatcctagcacattgggaagccaaggtaggaggattacttgaggccaggaatttgaaaccagcctaggcaacaaagcaagaccctgtcactaaaaaaaagaaaagaaaagaagaaaagaatgaagaagaaaggttttttgacccatatgggcatttcaaagtcttaatacttccaaatctggctcacaaataatgatttgtttacatatatatgaaaagtcaatataatatgtaaatttatatataatattaaaggaacttgaaatgtacaatgtttgctgtaattatatttatgttttcttaacagttcttctcttgtacctcagttatatccaaatattcagcctacacaggacctttcttaattttaccttccttgaacacaactactcaacagcagcttgttttaaataagcagccaaatgcacaattatttttcttttttctttttttcagacagggtgtcgtctttgtcacccaggctgaagtgcgtagtgtgatcagggcttactgcagccttgacttcctgggctcagatcatcctcccacctcagcctcccaagtagctgggactacaagcatgtgccaccacacccagctagtttttgtatttttagtagagatgaggtttcaccatgttgcccaggctggctttaaagtcctgagctcaagcattctgtctgcctcagcatcccaaagtgatgggattacaggcatgagctaccatgcccagccaaaatttttttctaaatgttcatatattattgcctaaggcaattagcatacttgcacgtgtgtgtgtagatatatatgcataaaattatatttccgtgaatatttatggagtgacaagtttctgctaaaatctcaactagttgttgggtataagtgatcactattcccatagccagaaaactaacaatgaggaggctctcattgaaaatatagtctaatatagatgtacgtatgtgtgtgtgcatgtatatatttttttctgggagctagaagtattacaaatatatatatatatatgatcacacacacatacatacatctatatgtgcacacacacatacatacatctatattagatgcatatatatatatatatatacactcacataaatatactagtgttcaccagtcgttgtcaaaattatttgcaatactgtcttcttccagcctcagggtctctgcatagaaagttcctgagggctattgttataccttctccctgcccttatctcttgcttatcctgaccccttcaagtcatagctcggcaaccacctccttaagacatcctcctatgactctacagggtattgaaaatcacttaactaagtatttcttatcacatctataattatatgcttatttgtctgatgaatacataaggcattaactattcaactattatcagatttttcaagaactatgacaattagcatttaatgaatgattacatgtataatggcttaatgcatcatttgctttaatcctcacaatgacacacctaggatctgcagagctagaattggaactgaaacagtgtcagtctggaaatcacaattctgtatttctgaaaaactttcttttttgtgaagacatttgtttacatcactgggaagctattagtagggcattagaaggaaacagattttttttcagtataaaatatgtttcatgtcactcatgtataaagtgacggtagcatccttaaatccccaggttctgagtacacagttcctaagctgataattgtctgctttagttgaatatttctcgcgtttttaaaatctcatacatagagaatagatctgttcattcttcatgagagtaatagcttgtgtctagtttgctttgtgtcactatctttatcttttactctgtttatgacaccttctttgtgcctttttgccagagaagcttcttgttcttctgctaattctgtcagctgggctgatcaaatgataatatttggctagttcatggctcatttgaagaagtgtttccttttttcccacatagcattttcttaaaaaagaacttcttgagaatattttcactgcttgaaccttgaaagcctgactcaccacatgtgagacaattaaaagttattattaagaaaatgtggtacatatacaccatggaatactatgcagccatggaaaagaatgagatcatgtcctttgcatgggagctggaggccattgtcgttggcaaactaacatagaaacagaaaaccaaataccacatgttatcacttacaagtgagagctaaatgatgaaaacacatgaacacagagagggcaacaacacatactggggcctgtcagaggatgagggtaggtggagggaaaggatcaggaactaataagtaatgggtactaggcttcataccttggtgttgaaataatctgtacaacaaaccccaatgacagaagtttacctatgtaacaaacttgcacatgtacccctgaacttaaaataaaagttaaaaaagttatataaatttaccattcacagccatttcataggtttaaaaacatcactcttcaaacacaattttattaaaaattcttgaatgacaatttttagaagttcatgatttatatctcaggtgcgagaaacaaaacccaaataaaagtgaactaaaatttagaaaatattcattatgtcacttaagtttttagatagataaatcacagagctgttcaatttattgtcttagtgacatttttaaaaagtggcttttcacctttctgtcatcttcagtaaattggcttagttctcctcatgaagctggccagcataattccacaatttgcattcataacagccaactttgaaccgtaaaatgtcactgagtcttcctataaatattctttgattagccagaagaccatctcagaagcatccagtggactttctctcttgctccactagctggaaaccaaaatcattctcactcctaactaataataacaaaggaaattagatcattaggatatgttcaagctttactaaagacaagagggctacgtcctcttctttaaataaactagggatgaagagacaaaaaggaattttgcctcaagggatatagggcataaatggttttttggaaggcaaccaaaagtataccctaaggtttttttcaatattttactgttaaaataatcttcaaaaatatatgaaaatgggtgacacatggagttttattgttttgtcttcaaatcaaaaatgattataaagcaattgatcatagtaatatagttaaactttagctattaaccattttaaaagtagtcaaatgaaagtaaaacctaactcatttatcatcaaacattgagctggttgaatgtgccagatactctcaaagtgtgaaatactctgacacagaggaataaaacccagccccaaacctcatggtgggagctggcatcatataataaaagcctcttcaggcaaaaattacgtgacagaaccaaagaatgctttttggaagaggtgatattgtaaaagcaatgaaagccaagactttaatttaaaaaaaaatgtattctgccaactaaggaaaaaaaaaaaaggttctcattatctaaacattgaagtggaaaaagtgttttgagtccccaaaagactaaagttctgatattgttatcaccagatattaaattcatatttatcatcccattcagcagatgaacttaattaggcacttagaagatgtatggtaaaatgggtataatataacaatccaaatcaacatggaacaaaattagaatttgtgggaaaaagatctagataatcagacctaatttaaacctgacttaataaataaagctcgcaaacatcccttatatctacattttagttctagaatctattaggtttgtcatgagcacagtggaatattttgtttgagcacctgaaagctgaaatgtttcatatgtgccctctttaagagacatcagattatgcatgagacaaaattaaatggtgaaaagatacaacaaacaaaccaaacatttccaaaacagtctttttcttcaaaagcttgtatacatctttgtgtcagataacctgtcactaagactgtattaggaatttaaaatgcctgtaacaaggaggagtgctgcagacctacataaaaaattcaaagttgatgtaaatattttcctgggaactagaagtattacaaatataaataaaaaatattttaattacaaagtttagagtatttgttctgttaaaataccataaaatacacattgttatgtattcttagtttagtatgtgctgtggactgaatatatgcatctccctcaaattgatacattgaaatcttaactttcgatatgatggtatagaagtgaggtctttaggaggtcacaagttcattaggaaggaatcctcatgaatgagattaaagtcctcataaaagaaaacagagggagacccctcacccctttctccaagtgaggttacagtgagaacatagctgtctatgaggaaacagggcaccaccagacactgtatctgccattgctgtgattgtggacttcccaggctccagaattgtgagaaataaatttctgttgtatataatctattcagtttatagtattttattataatagcctaagcaatctaagacagtatgactgttgaaaagtaggaatgagaaatgggactgtcaaaacaagttagttgtccattctcagacacactgagttgactttcgatgtgttgtaatgtaaaccgtccagagcatatccctaagcagtggaataatatcacagattttatgttctacaatccctcactgatgaaaaatctacctttttgtgtgtgtatgtttgtttgtttgtttgtttatctaaaggccaaataaataagtcatagtccacctatttttctgcccccgtcctataagtgatcagactcaaacttacggaaagaaactctaatggtctcatttgtttttagagctggtactgagctcatttattttatttattttacttaaataaatggaaatactggtgtctatttaaagcacaactggacaaacctctggaaacattttcttgttactccaaaaatgtacaataaaacactataatacaaaatgcattattaataacacacagatgtcctgaatatttcctttagagttttcaattaatgtaccgtggtttcaagttgcaattattgtacagtgcagagtgaagggaatgctcattgtgatcagttctttctctgttctttagtcaaaggcaaagcactctgtaataaaagcaacaatatttccttaaatttgatgtgagtgttgggtctagggacaattataaattcaatttgaaaaggcatattctttaatatctggtatttaatgactggaactatttctgtccggtgtacaataaatgacatttcatgctaaccaaatgtctgagttttctttttgttaacattggtcaatatagagctgtttttaataataaatgtagtttatgacccctcataattttacctataacccttaggttttaaaaaggtaaggttaaattcagaatattttaatatttttataattattctgttttttactacatgtaaaatacattgtatacaattgtataaaacataatctaagaaactgaacatccaacagatttcccttcttcttattttacaggttttgttttgttaacgttggttcctgcaaaatctatattttgaaatgctttatttaatactttgggttcttgggccaaactaaaactgaaatagcttcttttaaaatacattttattgcaatataatattatattgaaaatatgatcacatagaaatatggagagcttcccaatttatttaatgggctagtataagtccaatattaaaaaacagctggctcaaaaatgaaaagtaagaaggatataactttcttattgtatatttgcaaatagaatttatcactgtgttaaaaagattactgtgccattagggtttctaatgtaaaatggtaatttcacattagaaaacttattatctaactcagtagattttaaggaaaaatctattaatcttttggggttacaaaagccaatagaagcaacaaaaaaataaagtttgatgcatcttcacaataaaattacttgtggatttgaaatagaacaaaatttctttatcttcatatgtttgaaaagatatattaataaaagccctaaattaaacatgatcattaatattgaatatgctaaatgtccccattgaaaatagaaagaagcatgagggctcattgtcacataaactatttatcttttactgaatcttaatcaacacaatccataaaggcagtaaaacataaacaacatattgcaaaagaaaaacaaacccttattatttccaaactgtactatttccaagcaagataaaacccaaatagtaaaaaacaaaaaacagaatagtttagcaagacgactaagtaaaaaatcaatttacaagaaaacaattgccttaccctctatgagaaatggcatttagaacaaaataagtacaatgacttaatttgcaatggcagcatgatcaaaacatacccaggaatatgcttgtcaagatttgcgaattttttaaaggacataataacagccatcaattatattctgtgaggtggaagaggtgttatgctattcagaaaagggctttagtcccagttgtttggagagctctaggcagctttcagctgtcaggtgcctcagctagagagaaacagcttattaaaagtcctgccttttacagagtggcccatatcaaattgctgattgatagaggcattggtaaaaacacttagctattttagaccactatgggacaatatggtgggtggttggttttaactccagagttcccagtgcactttgccaaagttttcatggagtctgtatgagagcttgatttctccttctgcctaatcctgattttttatcctcccttccacatgttcatatcccaaaggcgctatctaataaagtatcctgcacactacttaccacctcggttggtgtcttcttcctagagaatccaacttgcaatactgggtgccaagagtggtccaagatatcaggcagtaagataaagttttagacctgaattgtgatgactagttggtaagaagacttccatcaatgctagtaggtagagcacaaatagccctggtaaagggtgaatttccagttgttcaggtggtgatttaagttggcatgggtcgaaaaaaatctactagccaggaattgggtatgtttggctaacctctggtgagtactctggaacaatggttctcagagtttgaacctggaaatttgtaagaaatgccaataatcaagtctcacattaaacacactaacttaacagctatggaggtggggccctgtggtccatgttagagaaatgcctaccagattattctgatatactgctttatatggcaattaacaggcatttgaatgtcaattttacaaactagaagtaacctaaaatgaatctattatctcctggagcagaagagcagaaaaagtagacgccaaggcccatgatttttttgtcaatacagacaggagagctaaactctaagtttaagtagtcatgcggctacaatgtctaaatctagtctggaatggagacttcttggctgatgttcctgaaaacattaaaactttatattcctgccaatcttctgaggctgtagaagtggcacattttttttaaacttttactttaagttcaggtgtacatgtgcatgtttgttacagaggtaaacttgggtcatggggatttaggtagtaaacccatgggggaattaggtagtaaggctaattcccattagttatttttcctaatcctctccctcctcacaccctccaccctccgatagaccccagtgtatgtcattcccctccatgtgtccatgtgttctcgtttctattaaggattagcatctgcttgtcaagaacacaagacaaggaagacaaagttctgaaaaatacaccaataaaggaacaatgagccattttaagattcagataatttattatttccatagacagtgaaggaaagagtgcccaaaggtgctagcttcccagggcgcttgtacaagacaacactaaggtaaaaggggagaaaaattcaacatgggtgatagaatgccatttgctgaggccattctagactgcaaccaacttgtttcatggcctgcaagctgcatctcaagagggacagtagaaatcttcatgcttcatcagaaaatgggaggcaatgaaaacatctctcatgatcatctctttggtaaatgggggaagcaagtgagaaaatggccttgtggaagcttcttataagcctcacgtgctcttatgttccaagagaatcacaaggtttcacaccaaaactcagatcagtggtggctcaagccttttccatgtggcctacatggatacacacaagaccattgagtgctgtcatggagttctcacccgcatcactgccactccttgttgaagacaatgcaaaggcttctgcctagcaagccaatatgtacccccaccctgaatcaagatcccaccctgaatcctgctattagccctattccttgggttaagtaacagcaagaccaagttagggacatggtctccctcacgccctctccataggtattgatccccaaagtactccaaattcaatattctgtatgttgaacactgtcttagggtctgcttcatggagactcaacttttgccagcaagagaactatgaatccagtacatattctatttattccctgatacatcttttgtacataaactcacggagattttaactagtcatagttgtaaaactagtaaatgataaagaagtacagacattatggagtggctgcttttaaccacaatgctaaaatgcctcactctctgaaagatctgtacatcaaaaagggtgaattttactcaataaaaattttaccttaagaaacaaagaatgatactaagttagtaaagacatgaaactagtctaactgctcttcaatggatgactgaataatggaaatatggtgcacatatacacaacagaatatcattcagcctttaaaaagaagaaattcttaccatttgcagcaacatggatgaacttggaggacatgatgctaagtgtactaagccaagcatagaaaaacaaatgccacatgatctaacttatatgaagaatccaaaagagttgaactcacagaaacaatgagtagaatggtggttgctggggctgctggttgggggaaatggaagatgttggccaaaggatacacaatttctgttataaaattaatacattctggcaacctaatgttcagcatactgtctatagctaaaataatgtattgtacacttgaaatttggtaagaaagtagatcttaaatgttcttactacaaaaaatagtaactgtgaggtgattggatatgttaattaggttggttggggtcacaatttcacaatgtatacatatattaaattgtcatgctgcataccttaaatatatataacttttatttgtcattaatatctcagtaaagctgaaaaaataaaatctaaaaagaaaagctacagtccatattgacactagcatagaacaagtgtgtttttctgtttaataacaactatgtcagcataaaattttctctgtgtaaatcctgtcaatttttgtatgagagcaagaacagtaaatcaagcataaaatatctcagattatttatagattctaaaattcccttcctgttttatatgctcaataaactaaatgtttttgttgtccatatgggagccttatgaaaacaaactgaagaacagacttaagatgttatcgactgtaatgaataacaattacatatggactcatttgtagagtactccaaaaaataaaggttaccaagaaatatactaagtgtttacatttttctaagaaatataccaataactaattttctatgttctgtcaaatttttaaagaggtaaatgaaaaataaaaaagaataaaagtaagtgaataaaatgacagaaaggaaatatttgggggaaaagatgaaataagaaaaacaatgagttgataactattgaagctgaatgatgggcccagaggatcattgtaccattttgtctgtttttgactggttgaaactttccacaataaaaaatttaaaatacaatagtaaattgcaaattattaaagtcaagatgtatgagagagagaaaatgacaatacctttaaagaaaaaaatctagaaaaataatcatctcttggtatagaaatatcttaaaaatatgattaaaaagccatattgacaggatgatacaatttacttatttaaaattttaatcatctctgtcaaaaaaagaatagaaaaacaattatgaaaattgacaacttgaggaaaaacttggttcaattataagggacttttactattcataataaaaggtttctaaaaactaatagatatatgacatccagttagaaaactggccaaagaatattgaacagaaaatatcccgaagaacatatccaagtttgcatgtatacaccacaatgatgacactggctaattctgggaaggtaaataagatacataaggcgactcaagggacatattggcatcttctgcaatttttacaaatgtttttaaaaaaataataaaattaattttgttatttaagcagtgtaataaatataataaatatatttattataaaaataatactataggtatgcaatttttataataaataggtgatttaaaattatatatattttaaaaattgtactagtctataaagataattttgaaaagttcaataacaagaaccacagatttgatttgtttaaaaaacataaattataaacattggctgataatgtagaacacctacattgtactgaaaaataaaaatgtcaaagagaaacctacccataaaaacaaaagtcacagaaacaccctcacctatatccccaagatctcaggtccagaggcttttatgtgagtatttaaaagttaataaagaagggaaaatattcatggtattcagtgatcctaggattacatgatacaaatccgctcaattactcttctaaactcaacttaaagacaaacatttacaatgataatataataaaatgtctggattcatttaatttattaaagagacatgcaaaaacctgacataatatactatcaaatttggttcaaatatatattaaaaggataatccatggtgatgagaaggatttgctataagaatgtaaaaatgacttagtgttagaaaatctggaaataccgtgatacattaagtgtggcggttaggagttaaaatgaaagtgacagctcaattctgatgctagtgactagaaatccaaattgtcaggcaatcagcagtaactccagactctgcttacctatagtgctagagacctaaatattgtcaggattgccttcatatgtttgagttgttgcaggaataagtttatagatttcagttatttatgccagtaaagaaagcagttgctgacactgaaacacagatgctccttgacttatgatagggtcacatccagataaacccactgtaagctgaaaatttcctaagtcaaaaatacgcttaataacccaataaattcaacgcgaagttgaaaaatcattaacaaaccattacaagttggagattatctgcttacctaagggtaaaaaataggatcgtggaaattatgcagcatgttagtatgtaaatacttttttcttaatcacaatcttattgcataacacttgaaaatcccttgggtcaaactacacaggttcagctatgtaatcaacactttacttgatgtcctaagctacttagagtaaaatcttagaaccacttgaaaaaaaaaaaaaaaagtcataggcagttcattctggaaaaaagcaaaaccagctattgaaataaagacaccaagagaattacttaatacattaatcattcaactttcccttctgtctagatctggtttgtcaagaattgtggaggctctgagattttagtctgttttctattgataaaataacctaccgcaattttatagacactggcagagcccattagagtttttattcacaacaatagcagtaaacagattaacatctttgcttgggttgactcaatcccaattttcacatgaatgatggtcagacgtgccagcacacgcagtgaggtgcgttactggggaagaatattaggaagatgtgatcttattaaaagggctgttagcaaacctgcccaatctctagaagaagagttatttaatatttatgatcctggaaggtaaccaaatcttctccaaaagggcacattatctttaccttcaaattcttccaataatgccaacggcattcgaaagataccctggagaaaatttgccgataaatcttttgccagcaagatggggcagaaatattagagatccatgaagaattgtcttggaatacagacccttgcctaccttcataaataaatttttgttgcaacagaatcacactcattcacttatgcataggctgtggctacttttacatatcaacagcaccgttgagcagctgcaacagagactgtgtggcacacaaaggataaaatattactatccgaatttttaaaaacatattgatacatgtgttagaaagcagactaaatataaacaagatcacagcaatatagaaaggctccacatgtctcactgaagtttccttctttcctggtagcattagctaacttaaaatatataagccactctcacataaataaagatccaatatcaactaaatctgtgttttaggaagccataatcctggtttgtatgaatataaatctgaaaatcacatacactttttctatacttttcatggcaaagaatgtgttcaatttgtatttctaaatttaaaaataatttaattatatctattgttaacctttaaattttataattataactcaattattctttgatttaatatcaattatgatctttaaaataaataaaatgcaacagtaaattttttaaatatagaaataaatatataattcattgttagatctgttgtagaaaaattgctccccattgtgccaagccaatggtggtgctacagtgttctataataggcaattaaaagttcttgttgaacaaattgatgtgtgtaccatagggtgacaaagactgtattcattgcaaaatgatgttgcccatacatccatatcaatatgaaattaaaattaatttaacaactaaaatgtgcatattttaataaattatatcaacttttactttagatgcagggagtacatttgcagatttgttacatgagcatattgtgtgtgagatttgtggtctggatgatcctctcactcaggtagtgaacatagcacccattaggtagtttttcaacctttactcccctttcttcttctcctttctagtcgtccccagtgtatgttgttgacatctttgcatccatgagtaccaaatgtttatctcctacttctaagtgagaacatttgtctgtcactgcgttaattcctttaggattatggcctccagctacattcatgttgctgcaaaagacataatttcattattttttatagctgcctaatattccattatgtatatgtaccacattttctttatccaatccactcaagttgatgaacacctaggctgattccatgtctttgctactgtgaatagtgttgcaatgagcatagaagtctgtgtctttttggtagaaccattcattttcctgtgtgtatatccccactagtgggattgctgggtcaaatggtagctctgttttaagttttttgagaaaattccaaactgcttttcacagtggctgaactaatttccgttcctaccaacagtatgtaggtatcatattttctctgcagtctcacaggcctctgcattttttgacattttagtaacagtcactctgactggtgggaaatggtatctccttgcaattttgatttgcatttcactgatgattaatgatgttgaacattttttcatatgtttactggccatgtgtatgccatcttttgagaagtgtctgttcatggcctttgcccactttttaatggggttatttgttttttgtgtgtttaattgtttaagttccttatagattctggatgttagacttttgttggatgcataggttgtgaatattttctcccattccatgggttgtttactctgttgataatttcttttgctgtgcagaagcacttaattaggtcccacttgtcaatttttggttctgttgtcattgctcttgaggacagtcattacgacttttccaaggccaatgttctcaatgatatttcctacactttcttctgggatttttatagtttgagatttttcatttaaatctttatatctttaacgcattttgagttatttatttaatgtgctgaaaggtaaagatctagtttcactcttctgcttgctagttattccagcaccatttattgaactggggttcttttcctattgcttatttttgtcatctttttcaaaaaccagatggttctgggtgtctggctttatttctgaattctctattctatttcattggtctatgtgtctgtttctgtaacagtagtatgctgttttgattactgtagctttatagtatagtttgaagtaggctaatgtgatgcctctgtctttgttctttttacttaggattgctttggcaatctgggctcttctaattctgtgaaaaattacgttggtaatttgatagaaacaacattggacctgtagagtgctttggtcagtatggtcactaacaatattgattctttcaatccatgagcatgggatatttttccatttgtttgtgtcatctataatttcttttagccatgttttgtaattatccttgtagagatctttcaccttcttggttacatgtattcctaggtattttgtgtgtgtagctgttgtatatgtgattgtgttcttgatttcactctcagcttgaatgtttctggtgtgtagaaatgttatgatttttgtactcttattttgtatcctaaaactttactcaagttgtttatcagttctaggattttttttggtagaatctataggattttctaggtatagaatcatactttcagtgaagaaagataatttgacttcttttcttatttggatgccttttatttctttctcttgcctgactgctctgactaggacttcccatagaatgttgaataccagtggtgagagtgggctttcttgtcttatttctattctcaaaggtaatgtttccagcttttgctcactcaatataatgttggctatagatttatcttatatggctcttattgttttaggtaaattccttcaatgcctagtttgttgaggtttttatcatgaagggatgttcagttgtatcaaaagattttttctgcatctattgagatgctcacatggtttttattttaaattctgtttgcatgatgaattacatttattgattttcacatgttaaatcaatttttcatctcaagaataaagcctacctgattacagcaaattaactttttgatatgctgctggaataggtttgcctgtactttgttcaggatttttgcatctatattcaacagggattttgtccagtagtttttttgtgtgtctttgccagattttggtataatattgaagctgcctttgtagaatgatttagggagaagtgctttcttctcaattgtcgggaatagtttctgcagaattggtactagcttttctttgtatgcctagaataattcagctatggatccatctggtaaagggctttttttcattggtaggttttttttttttactgatacaattttggaacttgataataatctatttagggtttaaatttctttttgattcaatcttggaagtttgtgtttccaggaatttatccatcttctctagattttctagtttgtgtgcttagaggtgttcataatagtctctgaggatcttttctatttctgtgggattggttgtaatatcactgttgtcatttttgattgcacaaatttttatatcttatatatgctataatatatgcttaaaaatcatatttaaagtaatgagataaagacaatgattttaaatattgtgtataagcataaacacttgatttgaaatacttcattaatttttgaaattcctttataatccagtgatttgaacttttttaaagctgtaggaactggggaaaaaccaagcaaacacagagatccaagtggaagaacctcctccttgtccgtgcttatggaatcatactaatttatttaccaattttacctactggctttacaaatgattttgttgaacttatgcaattaaatgtcaacattctctaaagtcaactgtatgttgttggggaaaaagaagaaaaaaacaaaaattctttttaaagaatttttattatactaaaagtttcaaacattaaaattttaagttataagatttttatatttaactcactgtagtgtttatggcaactaaacagtacaactagaaaaatatttttaaacggaagtttatatctatagcatgagtttctttcaagaagaaagttatgttcttaattattgttaagatgttggctttgctttgagtggtgcttctgtatgtgtatttctgtgtgcctgaaagttgggtatgtgtatgtgtgatttaatatatgcagcatagcaaaatactattgactcttttttatagaagtgcctacaaaatcaaaataattggatttttctttttataatacattttaaaaattgcctaatttcatttgatatctaaaaatttcttaccacagaataattactgtgtgatatgaaatagcttatactcatatttattctttatattatcttttaaagtgtctcctacataaaaccttaatttttaatttttaaaattgtttgtgggttcatagtatttatttatggggtatactggatattttgatgcaggcatacaatgtgtaataatcacatcagggtaaatgggtattaatcacttcagacatttattttttgtgttataaacaatccaaatgtataattaaattactcttaatattaaccatatcatcctgttgtgctatcaaatactagatcttatttattcttctaactattttttgtatctattaaccaccccacctatccccttccactatctcacagtctggaaagggtaaaaatcttatatttaaaaacataagaacacatctattccacagtgcagaaataaaaatgcattgcagtatgaaggaagctcattaacacatgaaggtgtcaattataacccttgcgctgtgattttccctgtgtttcctccagaagcctaaatctaggccatgtgaccctctggcatctgtaatgagtgaaagtggtagtgtcaatccttattctgaacattagtaaatattaatgcttcaacttttccttttaggcaaaaaatacacatgaaagtctaagttttttctcacaccattgacttctctgcatataatttctccttttggggatgactacatggatacagtaaactattacctataggactgttttaaaaatcacattgggcttttaaaatattttcataattaaacatttcataagtacatattttttcataagtagatattttcataatcatatggaaatatatacatcaatgttgaggatcaaaattgtatcctttgggctatataaataggacttctggtttgagactaattatgtgacagaggttttggcaggatactttaatctttaggtgacatattgtttccaaggttctatcttttgtaagaaatacacatttgttacatcagaagctatatttcaggagctgggcgttgtgttgatttgctaaagcagatgaccaatatgaaatggaattgctacaaatgatcctggtgaaaggataatcaagtgttattccccagttcccactgttttctgtccagataaaacatatatgtcaaatggagatttatagatattttcacctttcttacatttttgatagtggaataatcgcttatgtgggacataggtttatcttccccaaaatactattggacttactgagtgtctctttggcaatcatgatggcccatacagtgttgctttataccatgaaaattgccttctagcaaaattgattctcacagaattaattgatatcatcatatcctctatcactctggtatagatgaccttataaaataatacgtttgaatactgaagacaattccagcaccagctagaagacaccttgtaagtgtggatgtgatatatgcactgaaccatgaagtacaattgtaaggagagtgttaatacatctttctgtattgaaaaaaataactgcagacttaggcaggatttatatcttattataaaatctctggacatggaagaatttcagttccctaagttagcagctgtatcaggtaataaattatttacaaaatattatcaactaactttagatagcacaactgttccattgataggtacatgtatttttatttttaataagatagaagtttacctgtctcacacagaatataaatctattagtttatgcatatccccatattccatctactgttatttgatacttagtacttcacaacactgtcttagatggctccaaccatctcattcacattagcagcgggaaaggggaagaggtgaataaagatgtggcctatcttttatttttatgtcagcctttttataacaaagataagtgatgtacagaaaagtgcacacatttacgtgtacaacttgatgatttcttacaaaaaatgcacgtaactatttcccagattattaaaatattaatagcaactgtctttttccagtgctataacagaatatcacaggttgggtaatttataaacaacagaagtgtgtttctcaccgttctgaagactgggaagtccaagatcaaggcatcggctttccagctggtgaaggtcttcttgcttcattctcacatggcagaaagtagagaggcaagaaggtctaaacggctcctgcacactcattttataaagatattaattccattcaacaggacagcgctctcatggtctaatctcttccccaaatatcccacctcttaagactaccataatgaggattacattccgatgtgaattttgagaaggacacaaacatctaaaccatagcagcaaccaagaagctttgtttatgccttccccatactaatcaaaaaaaccaaaaacaataaaaaaaccaaacccacaacttctaaatttccaggatcaaaaaaacaaatccacaaacttctaaatttattctaacaatatagattagttagtatctggctcatttaaatcaaagttttcaatgtttaccaaaaccttgcatgtagaagcagtatgttcatttatttgatgtttaatatacattgctttaatatactagcttatataattattacaattttgataaattggatatctgagatttttcagatttcaatgattataattaatggtggtataaatacttttgtttatatcttctttcagagatatttatttcttttcagtgtacacttagaagtcaaatagctgtgtcatggaagatgtgtatgcttcatgggaatagatattgccaaagcctcttttaaaggagttgtaccaatttacattcctaccaacagtacatgagagtttcagtttctccaagtcctcagagattagctgacaaggattttatcgtatcttataaatatattcataaacatagggataaatgtactatcatgagtgaacacattcagagtaacagcagataaatgaaaactatatgaaagagtaaatgtaaattctataacagaagtacaatatcttaaatttaaaatgtactagactggcttctttgttttgtttgtggtgtttttcttttgtttctttttttttttttttttttttttttttttttgacagaggcttgctctgttgcccaggctagagtgcagtggcacgatcatggttcgctgcaacatctgcctcccaggtgcaagtgactctcctgcctcagcttcccgagtagctgcaattacaggcgtgcaccgcaatgctcagatggttttcgtatttttagaagagacagggtttcaccatgttggccaggttggtctcaaattcctgacctcaggtgatccacctgcctcggtctcccaacgggctggaattataggtgtgagccaccgcgcccggacttagattggcttcttaacaccatattggagatgccaggaaaagggtctgggaatttgaaggcagatcaacagaaattatctaaccggaatcctctcacaattcttaagatagatcaacagattcaatctaccagattctgtctaatctaagacaggaaaaaacaaagtcgtgaattctgtaatctctgggacattaagcaagagatctgacatatccataactgaaattctatgaggacaggagatagaatagagaagaagaaaaactgaagaaagaggggggctaaaagtttcctaaatttgaaaatgcaaacttacaaattgaaaacaaacaaaaaaacccagcgaacctcacaaaaaaaaagcaaaacaaacaaacaaaaaaaacccacacacgcctagacccatcatagttatacagctaaaaaccaaagatgaacatgaaacctggaaacggtcagaatcaaacagcccattacagaaagggaaggaaataatctcagctgacttctgctgatatacaatagatgccaaaatacagtggagcaatatcttttaaagttttggtgttggggtggctagctccagatttctatatacagtgaaaatatccttttaaaataaaggaaaataggctgggtgctgtgtttcatgcctgtaatcccagcactttggaaacccgaggaaggcggatcatttgaggtcaggagtttgagactagcctggccaacatggtgaaacctcatatttttttatgtgtatttatttatatttattttattataagtttatatatatttttatatatgtttatatatattttatatatttatatatacgtatatatatatacgtatatatatatatatatatatacacatatatataaatgtgaacagccactagctgttcacattttcatcagctaagcaccggataagtgaagaagtcttcaaaatgactgtaaccacagctgctttctgattttagcctcaagagggacctcatgaaactctcagccagaaaatcccacttgagtaactctgtcacccaggctggagtgcagcggcgcaatctcggctcactgcagcctccacccgcttgatttaagcgattctcctgcctcagcctcccaagtaggtaggattacagatccctgctaccaggcccagctaatttttgtatttttcatagagacaaggtttcaccatgttggccaggctggtctcaaactcctgacctcaggtgatcggctcacctcagcctcccaaagtactgtggattacaggcatgagccaacacacccggcccgattgaagagatattatgattgaggtagaaaatgtttgtatcatcaaaaaagacatgcaccatatacgtgtgcagatgattatgatgagaagaatgtggggtctattaccagttatatatgaattcaagggtatcataagaactctgaactaccaagtgtggttaaaaaaaagagaaacaactggtctattgcctgcctatgatataagcagagtctctcctgtagtcaaggagaaatcatgattaagatttgcagctctatggaatcagaatcaaggcaagggcagcttttacactctgatggaagactaattcatgtctgaagtttgtggcatagttaattttttactgctcttgctagggtgaatgatatgatactgtaagtcttctgcacatttatcacatggaatctttcctttagaagtgtaaaaaacatacagaattcaatacttgaacatacatattaaaatatataaatacacattaaaatatgtaaatacatgtattttttaatattcatactaaaaattaggcaactaatagtaacaatttaaaaccctactatttgaatgaaaaactatcgtagcaatattttaagttaccagagaagttattcaaggtggtaagaagctcccttcaatggctatttggataacctatcagatttgttttaaacagcaacagaaacccagtggatggagtcacagggagactgatttcaaagataagtttaaatatacatgaaaatgtgaatatgtaactatgatgaggacatgcacacatatacacatatgtagacaaaccacacataatatgtactgtatatttatctgtgtacttcagagctattaaagaaatagaatgggattgtttaagagaaagcaagatctggcttaatggagagtgttagatctgccttttcatccaaagatttggttactcaagctggatccagtgagtgaatccgcagtatcactgtattccattgatgaactatgggcttaaggaaatccatatgtgtagttactcagacacttataaaggacaaatgtttacaagtgtatatttatggtctagaatcctccgcacaaagcaatatttttatttgttccttctgcactgttttgtctatctaccctcctcatctagcacttcagttagttgcctttttcatcatcctggggaattctcttgtgtaaatactcataacctgaagggaactcaccccaaagaagtgtcaaaatgcttatgtgcactgtgactatcttcacctgcttagggattggctaaagcttgagtttgctatgatgatctgctataaaaatgctccccatagagcaaccaacctgtgaaagattactcagcctgcagattgcacaagctctctcataccaaacacagtatctctactgagctaagcagcaacaaatatagcatctgacatttacttacttaaatcttaaacatatgcccacagggagtttcaagtagacactgaatgaatacctcgtggtggaggtagagaaatgtaaaatatcggataaatgatgctttcacatctggattctgtgaagttcagtgatttaatccattctttgacctcagcttcagcacagtgatttctgaatccaatcctctttctgttacactttaaactctaggagtcattgttcccaatttgtccacctatattgggagaaaccagtttggctggagaaaatacagctatcatgattccactttttaattcaaactgttacaaatgtaaaacctgttaggattaaaagaacacaatcaatctgtaagaagtggtgggtatttcatcaaatattaaaaggtcaaatagtactaagcaatattcctacattaggaaaattacttaagaaaattcaatctactgggaactcttatctttgaaatgttataaaggtcatagaacgaatgatttaaaagtatggcaaacaaatagttgtttataatttacttatcttgctgtcttttttttagcgtatgtcactcctttataaactactctcactgcaatgaatcacatctcaaagataattaataaacttttatttacaaaatataaaattatctttaattttcatacagtgtggtctctgaaatatttgaaactattcgtatcacttctttgaaacccttatatatttgctttctatgacatatgctcagtgattatctttttgatctctgaaatgtacctcaatctatttgcagcttggaaatacagctccagaaaccaagtggcatgagctctataatttattcacacagaacttctcactatgtccccttaaaaaatatgaacttttggcctggtgcagtggctcacacctgtaatcccaacactttaggaggccaaggtgggtggatcacctgaggttgggagttccagaccagcatgaccaacatggagaaacccatctctactaaaaatacaaaattagccaggcgtagtggtgcatgcctgtaatcccagctactcgggaggctgaggcaggagaatcacttgaacccaggcggcagaggttgcagtgagccaaaatcgcaccattgcactccagcctgggcaacaagagcaaaactccatctcaaaaaaataaataaataagtaaacgaacttttgtaaagttgctgatttcatggaaatatattcttcttcctccccatacctttacacctttgattactgtgtttaccaaattcgtagccatttttcaagatttagttgataattttctttctctgtgaggccttttactcaaaatgtaagtcaaattctaccagagagccttattcccatggcatagcaaagtcctgggcagataagagacattcaatttatgtaatagatcaaacaagggctttagattcagaagtcctggatttaaattttggctctcttgtgggtttgaaatccttctctggaagcctttgcttcttcatagaaaacagagctaataaccacttttctgtaagaattgcatgagaaaacagaggaacatcacctaggacaatatctggtacttagtagaagttccgtaaccagttgctactactgacactattattattatttctctgctctcccaccttttaaaaaataatgataaataattaaatatatagaaatcttgaaatgtcctttctttgtgaagttgtgttaccaatcaagataatcacatctctttagacacctgatatggtttggctgtgtccccacccaaaaatctcatcttgaattgtaatccccataatccccgcttgtcaagagtgggaacaggtggaggtacttggatcatgggggtggtatcccccatgctgttctcatgatagtgagtaagtctcatgagaactgattcttttaaagcatccggcatttactccgcttgcactcattctctctcctgccaccctgtggagaaggtgcctgcttctcctttgccttcctccatgattgtaagtttcctgaggactccccagccatgtgaaactgtgagtcaattaaacctctttcctttataaatcacccagtctcatgtatttcttcatagcagtgtgaaaacagactagtacaatacccctgaaatatacatggcatttgtttttctcctgcaatgtatttagtggtttatctgtttattgaattcttctcaagtcagaaacaataaaaatatagtagcttcttcttaaatcatatcagtccatctttccaatgttatactattttctctcatggattcaaaactaaacctaactgtagtaacatgatgatttatataacacaataaacaaaataattattgtgataagtagtcatagaatgttgatgtttgcttataaatgtatcattcacatacagaaggtccacatgattttttgactttatgatgatgtgaagtgataggcatttggtggaaaccgtattctgagtagccatacaaacattctgtttttcactttcagtacaatattaattatatgaaacatttaacagtttattataagatgggctttgtgttagatgattttgtccaacagtgtgggcaaaatataggtattctgagcacattttaggtagcttagcctcagctatgatgttcagcaggttaaatgtattaaatgtattttgacttataatactttcaacttataatgtgtttactggaacgtaactccatcataagtaggagagcatctgtacttttctacttttatccttctccctctttgggagtttgaaatattttttaattcacaagaaaaccaattaattgttaaaatctagttgttgaatttccactagttcctcctccaggtatttagcaggacacttaaaattagtatgagtttttcttccacagtggacactagttatgcaaaaaagaaattgcatattagataaatgttgtttagccttgatgagtggatgggtacatatatttagtcatatatgttggctaacactatgtaagggaagagatgtgatattggagattgtgtatttcttcgaaggctgtaactggataaacaaaggggtcagaggaaaaccggtgtaagaaaaaagcattaaaaagaatgacgattaagcaggtttaggaggaaagcagatccctgtctatgactaaaggaggagagagaagccagcatattggcaagtcttctgtccttcagaacacctacaccttatttgtttggagtagtagtgttcagcaatatttattttcaagattgtaggtctgtgtattaatctgtttttatgttgctaataaagacatacctgagactggataatttataaaggaaagagatttaagggactcacagttccacatggctggtgaagcctcacagtcatagcagaaggcaaaggaggagcaaaggcatgttttacatggtggcagacaagagagcatgtgcaggggaactgccttttataaaaccatcagatctcatgagacttattcactatcatgagaacagcacaggaaaaacacacccccatgattcaactacctcccaccaggtccctcccatgaaacgtggggcttatgggagctacaattcaacatgagatttgggtggggacacagccagaccatatcagtctttaatgctgcctctgcggaaaaatcccaatttctctaatttcttttatatataaaatgttttgatcatggacatctcagtgtgttaaacactcagatgaagaccatgaggaaatctgagttatctttgcaattagaataacctcccagataattaacattagtaaatactaaatttcaatgctttatttacccctcaaagatttgctaaaaatattttatttatcaacattcagtacagtaactctatatatgagcaccacaattttatacagaaataagtctttgtatcttgatgaatacttaaggcttagtagttaacaacatttttatctactgatgatactaagtgcttttgcaaggttaatgaattttaatatggaggccattatgttactctgtctgcttctcactgtctgctgcactgaaaaaaaaatccaatctattaaaactcagtgtggagcaaagccatgaagacccactagtaattgctggttgatgacgttgcacagtagttggtccaaaagagatctggccttgcagatctggcagaggagtctagtaaaatgccacaaaagttattgcagaatataaatcagaaattgaataacagtagtcaccccactgatagaacattgaggttatgtttactccagtggtagcaacatggttatagacccactggcagcattcgtctcaggcaaattaattagcttagtctactccaaagccacttagcaaagattgcaaatcattggagaaaccaattaaaccacaataaggaagcccatgctgatcagtttggccatatattatggactgcagaatctcccaagcattctcattttatgtgcattcacataattatgatcctggtcagaatggaaaaagagaaattattgaaacaattgattaaaatttaagtttatatatgggatgtttggatgtaataaaatgctaacaattagtcatctgagtgagagaatggtttaaacttttcttataacttttgtatacattttaaattatttcaaagtatgaattattttaaaaaattaaacttccaaagaataaaaatgcattatgaaataaaaatagtaataataaataaataacctaacagccaaacctaccataataattttattttcaatcaagtcaaccttaaaattaaaaagtaaataggaaaatgatggtatctttgtttttattgttggtcaaatcactctcagtgaatgtaatacttactgaacagaaacacaaaaggtaataatacattacggatatttaaaaagcaggtcttgatataactgtattttttagaaagagtctatgtttcctattttaagggcgtgtacaatcaaggcagtgcatggcacaaaatattttttctgttttaatattgtttgcacagctgcccagtactttagaaaaaaatcagatcaggcatattttgaagtaattcatggtctttgggagtgaagtagaacgtagaacagccacagagatgacatcttcagtgctatttgcagcctggatataccctcacatgctctcttgtcccaaaagacatccaaagcaggcctggatggcttctgaatatttggtgttttctcatatcatcaccttctaaattcaggctccttattagaggaagacaagcctatcagaacagatgttcagttgagtggaaagaacagactacggactgaatcagtaaatcattaaatggatactttaagaaaacaaattcattatttttgtttttatattacccagattttgacaaaatatatgcctttttcatatcatgatcattttaatgaagagttttctctcacacaaacacttactaatgaatataacaggatctttgtttctgctgaattcagacaaaaattgtacattttcaaccaaatttcctgaaagaaatgtgaaaacatttaggcaacagaagttgcctgacattgatgcctcactcatttgtgaaatgtcttattatttagtctatcaatcagggccatagattttattggatttagctacctaatgtctgcacctcatttcattttggtaatttatttatttatttttaaatgggtaaataaaaattgtatatatttatcaggtacaacatgttttgaaatatgcatacattgtggaatccctaaatcaaactaattgacatatatattttctcacataccattttgtgggaacagttaaaatctattctttcagcagttttcaagaatatattgttattagctataattcactatatattatctctggaacttgtttctcttgcctaacccaaattttttattatttgattaacatcctcctaacaccattctcctgcccacccccaacgcttggtaactaccattctaactctctgcttctatgagttccacatttttagattcttcatgtaagggagtttatgcgtagtgtttttctttcttttaggcaatatccagttcaaatcctcatttgccataaagccttgcaagagcactccttcaaaaagtgatctctcctcttcaggtggtatggcatgatttccaaaagtttgctccattgaatgttctgatccttgaaatgatgtgttttctataaattatattttcaattaagtttggaaagtactatagactacaactcctcttgcagagattgagaaggcagattcactattaagagttctgaaattgccagaattaataaatcaaattagcttggtttagtctaggtttttctaacgtacttgatgatggaagctttccccgtccgctaagatttattcacatcctcctgaattatatttcatatatctcaatttaagaaatgctatattatgaaaagtagataaaatatatagtgatgaattattttactattttagggtgtgttcattttttgcagtcaaattggttattttcttattttcctttttgcacattcatgactgctttgagcattgtgttctttcttggttctcccaaaatacctaacagcatcatggtaggttttcaatctttttgatttagcaaaattatttttataaaaatatgaattaaacaaatataaaaataaaaaatatgtcttgatgaaacactaagtaataccatgtttaattaattgtctgaaaagacataaaaatggcataaagaatagtgtaggtatacacataccacagagcttaaaaaataaaacttgaaaataaaagttgaagatccttgtatatcccttcctggtggcatttcatgctatttagaggaactcaccatcctaaagttattcttcctcatttttaaagcttttctaacagtttattacaagccctgtatccttaagcagtagtgtcgacttattttataatttatataaatggttctgctgtgtttctttaacttttttcttataaatatatttgtgatttttagccttactaaaaaatagtcccaagaatttatacatttaatgctgaatagaaccatgttatttgagcacaattatcattattattatattattgtatatgcattacaatttgctggtgcttgaaacaatacttctgtgaatattctgaaatgtagcagcattaatgctgttggatgtattccattatacttggtcataaaagcaatttctgcaccataatatatgcatatgtttactttcattgtgtcccagttacctattactgggtaacaactaacctccaaaacgttgtagtgaaaaagaaccacgatttgatttcactgacagaactgtggatgtctgggatagtggagaaggctgaggtggcttaaatactgatatatctgaatcctttagcttgtggactcacatctgctagtccaggaattaaagaaaaaaaaatacacactgtaaaatcagcctgtggcctgattgtatatggcccctgaaatagaagtcatttttacatttgtaaagggttatttttaaaaagaaaaaaaaaactcaaggaagtaatagaagtctttatgtgatcctcaaaacctatattatttatactatgtggcctattacagagaaacaaaataaaaataaaagctttgctaacaaataacttggatatggcatgtgacgaattttttaaaaaatatattattacaaactctgcctttactgataaatgtagtacagctgtatttattgtgtttactagaaggtttagggtgttttccctaccatcatgtgtactactttctattcattatttttcccttttacacatttatatttttacaatttatttttgaaataaaatgtacacagtgaaaaaaatgtcttcaatatcttattttgtttaaggatcataacaaagctcttagtgtaactttaaaataatctataacttaatctactattttgagtgagaaccggtctcaaaaatatatatatatatgtgtgtgtatatatatatatatatatgatgttctagtgctatttcaatataaactaacttaactcctgccataagttctgccccattagccaaatgcatttttaatattttttctttggatataattcctaggtacttgcttagtgatatgattccataatgctttgacctaaagcatcacatacatttcaaaattacctgaattcttaatctcttatcccccaactaatagtcttgtgcaaagatgcacaagaatgtgcctgaaggcaatttatatgcagaataagtaatgcagagagtgaggcaattatcgcagctggttatctatagtgattaaattcaccttcgagttgctctcttctccaaatcatatgacaaacacacaggtaaaggattcagttaaaattataattccttccattcaccaggtaatacgtgtcttctttcgtggaaacagaactcatctgaatgattatgatttggcattcacatagaaaagtggttctcaaagtttagtgcctatcaaaatcacctgaagagcctcttaaaaaatggagtactgagttcaaaaatagagtgctgagtcctacttccagaattactgattcaatgggtctataaggggccaagttgttgtgtttctagcaggtttccaggtaatggtaaagacgctattctcggcatcactttaagaatcattaatcatcgctactattaaagaatcgatcatattgcaacacccggaataataaggaatattaaacattcccccattttcagagcaatcctagctttatataatcaattagggcttacccattctttttgccaacttctagtaatttaccaactctgtctgttaagtataaattaagctgctgaccgaagttcttattatatttcctcaattgtgtatgagaaatgaaatattgaatgaaatcatcacttgaccagagataaatccttacaatatttttagaatgctaaatcgtattagtatctccattaaagaaattagtacaaattaaaggagatcaggaaactctgtgggacaggttttgtgaatcaattaggtaggctgattatcaaattaatacttccaattattcttgaaagaaataattaagcaccatagcctgtctgcttaagaagaagaagttggaacataaataggtagaaccatgtttatatatgtagggtaaggttgagagagaagagaagtccggtaacaatgatgcatttcatgaggcatcagaaaacatccatgatttcatcaattctagaactgcttagatttcttgcatttctgaggttgctacataaaatacagaacacccagttaaatttgaatttcaaatgaacaatggatatcttttagcacaaggatgtcctaaatattgcatgggaaatatattactataaattatttattatttttctcagcattaaatttaactaaggttttcatctgctaaatctggcaaccatattctaattggacctgctcatgtaaaacatttggcagatgtatggctgtatatgaccaggtaggaataaagaggtttttttctctatttttcccaatatatatcattgtttgtatcatacagtgtttagttagggaaacataactcctttgagaattaacagcttacacatttgttggaaaagctagggaacagagggtccaaaagtggaaaagttaccaacgagcctcctgaaacatttatgtgggtggaaaatttttcaactgtcaagaaaatctgggaaggccggatgtggtggctcatgcctgtaattccagcactttgggaggtccaggcaggtggatcacttgaggccaggagttcaaaaccagcctggccaacatggcaaaaccccatctctactaaaaatacaaaaattagccaggtatgatggcacatgcctgtaatcccagctactcaggagccttaggcacgataattgtctgatccagggaggtggaggttgcagtgagccgagatcataccactgcactgcagcctaggtgacagagagagactgtctcaaaaaaaaaaaaaaaaaaaaaaaagagaaaatctgggaatccaggcatgtccaatttctggagtaggaatgtgaaggaaaattaataaaaaagattatgaagggctcttccctctctgcctttggaggttggcctatggacaacaaaaatatagccaatgggtgaatgatgttcaggatatagatcaacaggtcaagagtgaagttggaattgcagataaagatttcagttgctcccaccaacatagtaatttaagctaattggcaccctatacttcttgtcttagttgagggttctgtaacaaaaataccatagactggatagctaaacaacaagcatgtatttctcacagttgtagaggctgagaagtccaagatcaaggtgccaccagatccagtgtctggtgagagccctccttctggttgcacatggctgtcttcttgctgcatccttacatggtagagaggggagagcaagagcaaacatgtgtctcttcttataggggcactaatgttactaatgagggttccaccctcgtagcccaattacgtctcaaaggcaccacctcccaaaatcatcacattggggtttatgatttcaacatttgattttttgggggtgatgcaaacattcagcccataggacttttcctatttctattcttatcaggcactatggcaagttgtagatttgtaaatcccctgttaataaagagatctctctaactgaattctcacacttgtgccttggtttgttatttcaaaacactaaaaattttttgcattacttagtagcagatatgtttcaatcaaaaatacataggaaaaataataagacagtcaactgttttatttttcaaaggtaggggaggcattttattttattttttaaactttcctaaccctatttattacataaataggagaatttatgaatttcttatgaaaacaagactagaagagactaaagtgaagacatcgagcctcctcactggctgacgtttattgttgagaaaagtttaagccccttcatatcttccacatctcccataacttctattttggcataatgctaaaagagtattctatatatttaaatataatgaaggctatagtatattcaaaagttggattacattgactagtcaattcaaacaaccattaatggttgtcagtcaatgtaatccaacttttgaatgtgctatagccttcattatattgcattaaatgcagcttaaacttcctgagcagtttaagcactttaagctacactgctaatctgttataatagactaatgcaatgttccattgtttgtgttcattctgagtctgcaaatttagtcctttcaattcactctttttttaatattattttattatatttttatttattttttattttactttaagctctggggtacaagtgcagaacgtgcaggtttattacataggtatacatgtgccatggtggtttgcggcacccatcaacccatcatctacattaggtatttctcctaatgctatccctccccagccccccacccactaacaagccctggtgttgatgttcccctccctgtgtccatgtgttctaattgttcaactcccacttttgaatgagaacacatggtgtttggttttctgttcttgtgttagttcgctgagaatgatggtttccagcttcatccatgtccctgcaaaggacatgaactcatccttttttatggctgcatagtattccatggtgtatatgtgccacattttctttatccagtctatcactgatgggcatttgggttgttatcaagtctttgatattgtgaacagtgccacagtaaacatatgtgtgcatgtgtctttataatagaattatttattttaatttgagatggagtcttgctctgctgcccaggctggagcacagtggcatgatctcagctcactgcaacttttgcttcccaggttcaaataattctcctgcctcagccttccaaatagctaggattacaggtgcccaccaccaaagccagctaattttttgtatttttagtagagacagaacttcaccatgttggccaggctggtctcgaacttccagcctcaggtgatccacccacctcggcctcccaaagttatgattacaggcatgagccactgtgcctggcctcaattcactctcttaaccagaaaaatcagtcaaatattagattattccacagttaaattataattaaaataatctgagcaacttaatcatcaacattcttttatttcttaatatatatattttaaatttcctaactaaaatgtattgatttagtattttttaaaaaagtgtttttagtattcatattttgtacaagtgcatggcacatacgtaaatttaagaaatattaaacttattaagataacaagaatttcaagtacttattttttatgtttccaacaccacttctttttttattttttattttaagctgtttatcatgttagggctaatgagcatgcagtataatatgcttacatattatttatgtaattctagaattacctattttgatgacaatgctaaattcttatgcctcttttttttaattactactgatagcacagttagattttctactctcaattttataaaagtggaaaaatataatattcatttatattttaggtaaaaatttgaaaatctataattttaacaattattttccataacctaaatgtgactgtatgttttgaatatgtataaacagtgaatatttattttaataaatactgttttgcagtccatgtaaaccatgcagaagcaaatttatttgggactgattacagactttaatagctcatctcatgaggacataagcagatcaaattaaagtattaataatactctgacacaattgatttgatactccaggcgaaaatattatcatggatcacagtgcaggaaaacatggtattggttattctaggtaaataaagggtaggaaatttattatactttttttattttgaccccatgaggtaagatttggtcttaaatgctacatgatcatagcatgaacccaacagcttagaatttctaagccatcctaaaattgctttagtgacgtttagtaaacaaatatttttggatgtttctttttaccaggcaatatgctgggcatggggaatatgaagatgacagaagtacacattatcccagtttattagtttatgtttactgtttgttttatatgttatgaaagaaaacaaatgaatagaaaattcaaataaacagagaaaacaaatagtgggtaatgtgcacatgtttactttagaaaggtgactggaactggcttttctgtggaagcaatattgaatgggagatttaaaaatcaagaagaatggccaggtgcagtggctcacacctataataccagcactttgggaggctgaggcaggtggatcacatgagatcaggagtttgagaccagcctaaccaacaaaacgaaacctcatctctactaaaaatgcaaaaattagctgggcttggtggtgagcacctgtaatcccagctactcaggaggctgaggcgggagaattgcttaaacccaggaagcggaagtttcagtgagcggagatggcaccattgcactccagccctgggggcaagagcaaaactccatctcaaaaagaaaaaaaatcaagaaaaagatagttataggaaccacagggggaagagcagtccagaaaagtgtggtagcccttggttaatgtgaagaaattaagagaagttcagtttagcttcagagtatatcacattggatgatatcgaagacagacatgaattcatattttatttcaagtaataagcaaacgttggcccttcataaacataaaagataaattgtgcaatttatatttttgaaaagtcattcagtttgctgtgttgatattgcagagttatataaaaagtgggaagaccctttccgtggctgtaacagtaagataacagagctgatggtggctttcactaggggagtggagatgaaatttgtgaggactcagggagaacaactgtgatagtaatagtgattgtaatatatagtggccaagggtatttacaacaggaattataatgttgcgtaatggaatctaggttagacaaaagaaaaaaggaatgccaaaagatactaaatcatcatgaaaatagcatgagaataatggcctaaaacttacaatgaaattaaataattgagatattgagatttttaagcaagtattatggaagataagaggttgcagttgggaaacaaacttctagaaataaaattccaaaggtagcccaaaatctgaagatgatacatccagcagggggctgtcttagtccatttgagctgctgtaacaaaatgccttagactgggtcatttgtaaacagcagaaatgtattgttcacattctggtggctggaaagtgtaagatcaagttgccagcagacacagtgtctgttgagggcttgctctctccttcacagttggcaccatcttgctgcatcctcacacggtggaagggacaaacagggtttctcaagcatcttttacaagaccactaattccagtcatgccctcatcacctcctaaagcctccacctcttaacactgtcacaatggctattacatttcaacataagaatctgtggggcacaccaacattcaaaccttaacagtgtccatggcagtggatagataggtaacttggaggggaaggaaagataaatgataacaagacagactgaggcagtagagtgttagatagttaagctctgcagaggtggaattcaaagtgattaatgacaggcattcagggaaaggggaacaaagtctttagtgaattagatgaagttaatagaagttaaaaaatagagtctggacttttaaatataattgttgagctttaaaagcaatccagaagttgaagctataaacaaagctacaattattcattaaagtactataaaacaaagcaatcttctcatctcaaatgtagagataattatatttgatttgaaattacataaattgaatttcaaccttagcatgataaagccctttgagagtcttagaaagaagctgctacatatatacaacttattaccattagaaaagcaacttgaccctgaaatctgtgcttggaatgcattttatttttctaatttattattttaagagcagttgtaatacaaaatacaattccgtttaaatagatatatagtatagtatgacttcagatttgtttattgtgctttattatataagtaaaagaaaaaataatgttttccttaacaaagcaataaatttattgtgcaaaggcaaagattgcttcagtttgaatttcttgccaaaccagataattagaacatacaaacaagggctgattttttttcgcagaatataaagactgatataaggagacatgcattattggaaaggcaattatacatcaagagtttgtccaaaagagaagatgcatctggcgtttctaatttgatatatgagtaatctgagattgaatttatcacagaaaaacctgtaatcataggacctttagaaagatcaaattatgggtgatcagaaagcattagcatcacctgtgaatcaggaatgcttctgctctaaggaaaagcctcttgattcaaaactttttcaatttttttaccccagttttttcttaccacagtttccatcagtctggcacaagaaatctttggcttaaaaaacaaatagcaggataagaaaatcttaaagtgcaaactctaaacacaatgcataaataaagttcgatatatttaaaatatttttaattttctttgagttccctcctaaatactggctatatttctttgggttccttcctaaatgtgagtatcagctaacattataaaacaaaacatgtaattaaaaatttggtttcattgctaattatccattcctagaattctaggctgaaagacagtgcttagttttaatattcgagtaaggtatttctaaaaaacattatgcatctggaacagtggtttctaaagtccagggttatttccacagacttacattcttagcagagaagtttagttatttattgacatggtaaattattgagctctgaatttttgtttcctcttctctgtggaggtagatgaagttagatgaagcaaaagatgatttctaccactctgtattctttggattccagtgatgtaacttaactcaaaaacttataaaagcaaatgaagtccattgtacaaatgtgcaatggaaatattaagactttggttgaaagtttgattaaaataaaactgacatcatataattctaacagtgctatcgaagccatgcatctgatagcattgctgctttaattcataatttataagaatgaggaagagctggctaacatgtctgcatctgtcaaccttaatgtgttatgattactaaaaatctgtaattaagtgaagaactgctagtctttttttgtgtttgcggacagatcttaaacaaataaaattctatggaagtgatttgacagagcctaggaaagaggaggaatgctatagcattaagagctcatcctctgagttagataaactatgtgttcgttctgtctttcccacttataggggtgtaattttcagaaattcagctggttcccctaagcctcatatttgtttgtaaaatattattattaaatgaatagagttttgataattaagtacatgttatatataaaacacttaatgaccttcatgtagttgacctcagtatattacatgtacatatacataatacatgtatgcatatgtgtgtttatatgtatacttgtaaatgttttcttattattagatagatactcaaaatggattttgctcagagaatttacatcacaaatattattgtactctatagcttcttccattaaaaaggcatgtgcaaaattcaagttcataaaaccatttcttaagtagcaggaaaatcaccatctccactatattctattttaaaattttcagaaaaatcagttgacattaagatggtgtattagtctgtttttacacagagctgcctgaaactgggtaatttataaagaaaaaaggtttaattaactcacagtttcacatggatggggaggcctcaggaaacttacaatcatggcagaaggtgaagcaggcacatattacagggtggcaggtgagagagagagagagagagagacggaaagagagagagagagacagacagagagacagacagacagagagacagacagagagacagaaagaggaaaccactgctgatgaaaccatcagatctcatgagaactcactcactctcacaagaacagcatggggggaaaccacctccatgatccaaacatcccccacaggtccctcccgagacaggtggagactacagtttagatggcaattcaagatgaaatttggggtgtggacacagccaaaccatatcagatggtaaaagagatttcatttgccatgtaaatacatcacaaatgtaatcttctacctttttgtgtctactttgctgcatgtcattcactcatttatctatcccttggtcactacaaaatatagaagtgcctactaaaccacattgaattactctcagtgtgatttttaaaatatgctctaatattgctttaatcagactgtctcaataaccatagcagctcattgtacagctgttagataaaaagagttttacttaattgccttgaagtttacttgattttggaactgtacatatctgagtcactgataatgttctagaaatggtttctgcaaatttgcagattaacagaccgtttctatggattacttatgtttgagttctgtaaatctaatttaaataagtagctgttttcctcgatgagcaattttataaagaagcaactattaatggggatctgtttatggattatttaatgtcactatgaagttttaaatttttttcttggagaacagaaacaccaaatcttaacaacaaaccaaataaacaaacttctcaaacacttaaattagaaaataaaattagataagcataataaaattagaaaaatgtgatattcttattatcttgaagataaattatttctgctccataatttgtttttagaataatttctgctccataatttgtttttagaatactttctaaataatgattatttacacattctacagtaaattattcttctgtctgcacattggttgtttctaactctagtggggaaaagatttttactgactgataatcagcaaaatataaagtaacaagaatacaccaccaaaatttgagaataccaagtgctctttaaaacacactgatatatgaactctcataatttccccacattatttttctgagattgtttcacaggcagaattcttaagtttctaagtactgtgatttcagcatttggcatcagaagaaaacagcaggcctgagaagcttatacttacaatattgaaaaagaaaagtgaagaagaaattttagaagcagaatatggggaatgtaaagcccctttttcactgcatcatatgcagactatcttaaatttattaataatatattaacagataaagcctttattatttttagatttcatgttctatctaaattcttagtgggctttgcttctttaggatccaggtgataatatttgtcatgcactctttcatagctacaaattatgtaatattttcttagcacccactgaagacaaactttctaccatttctcagtgccattaaagcacgttgtacacatatgtataccttaaatttttaaaatgccagcagcccatgaaaatacagcccagttttagtctgatataatttggagacttctttttggctattggacttgacaactatggataaaatccaatttgtcaaaatgcacatgataaattcttaccaagataacacactcttttgtagggtaaaaagaaactaatttgtgcaattgtataaattgatatttttaaaggttatcacccagtgaccttatcattagccttattattgccaacttgtcctaaaatgttaactaggactttggtctctctggcagagcaagaaactccatgcggtagaatcgtcgtggttcttcatggcctggctaggtgtgtggatcttttccaaaaggaaagctaggagataattaatggctgggtgccataatctatagtatatgagttatacgaattgcctagaaatcctaaataaacccaggttttacacattttataaaaagataaagctttacagatgtatcatgttttatatgtaatgtataagacgttataaactgtacgaatttaatttttaatacagcttaggttttgtttctaaacccagtgctatagactgcatggtttcatcccaccaaaattcatatgttgaaatcctaacctccaatgtgatggtgttaggaggtgcagcccttggtaagtaattaggtcatgagggtggaaccctcataaatgggattcgtgcccttataaaagagatctcagagagctccctcctctcaccatgttaggacacagcaagaagacatctatctataaaccgggagggcagccttcacttgacatagaatctactggtgccttgctctcaaattttccaggctccagaactctaagaaataaatgtgtgctgttcatgagccccccattttatagcattttgttatagcagcccaaatggatgaagccaccctctttttcaagaacacagtaaaatcttgccatagtatgattatagagagaaagatttcaaaagggaaagcattttttaaatgactagtgcaaagtaggaaattaccattttgtggcacatagagctagctaatactaataatttttaagctggctttcaactgcagctatccaggtgccacacctgtcataccagaagctgtcatctgccctaggcattttcctcttattataatttagcagtataagtaaaccagacatttatttaggttgatgcaaaagtaattgcgtttttgtcattgaaagtaatggcaaaagtaatagaaacataatttttctgtgtttgttgataacagagaaagaattaactaaatgtatctttgcacttctttagacaatattgcaatacagtaatgaggtaatgtctattgctttaggtggaggcaatcttattctttaataattctgaactaatagttcagagcagaaatttcagctcaaccaacacagcaaatagcatctcccaagacatttatttgcttactggcacaactgttggtggtaattatttggctgattttcttccatagaggaggtaatattagcaatgctgcccagtccttgaattgtttcgagtaaggaaacttttataatgaggaagtcagttctatgttgtgaattacaaataaggtaaatgaggcccatacttagtttatggggtggcagggtggagagaaacaaaagaaattattagctattgacaaacaggcaggaaggctgtcctattgaagactttgctaaccacacagcatgggataaaactcatttagagcagttgtgaatggtggaggaacaagtctgggcttgattttgacatagggttgattttactagttagcaggaagaagttaaattaggagatctactaccagcaaccaccaggatcttcttgtcagccatcataaccagagcagtgtccaagtgaggagtggattttgggtcatatttctagggagaaaaagataaattaatattataaagctgtttagtgggggcagctgacattttctagtatttggtgacatagatctaagatggtagttcttggcacttaatagctaattattagaccagaaaccatgaaaaggcttttctagtgaagttccggtgatgtttcagctggagatccttgttgtgaaccccatcaccaggcatttaccttggcaaggtttgtccaagttaacccgtgaaaggaattctgttgactcactctgattgtttgaaaaacatataacatgaaccgcataatggtagtacttcccaaatttgtttatatcactatacacagaaaatgtgacatttataggccacactagggttaacagacaagcctgtcaaggttaaggtgggtggtggtggtcgggtgtgctatgaggccttgagcctggccatcctgacttggctcctctacctggttctaatcatactacttgggctatctgatctatcaaataaatatctcagtacactaattaacactttatatgtactgcaaagaatccaaagctctttttctgcagctgccgtatttttaagggccataagcagaacattttgtaatgtaaacctggttcaaatcatagtacttgaacatggtattttggaatttccgattcaacatttcaggtgctttaggaaacaatagtgctaatgaattcaaggtaaatgataactttctctaccataagacttgtgaagtgtgtccacactttacattaagaagtatttaagtcattaagtcgttaagaagtattcatacctcgggccaaaatattttagaagaatcctgctgatgatcgctgcatcagacttggcatatgggtctgttttacccattgtcaatatcataagtgctcttaaattttttcaggtgaacaaatggaacctgaatgcatttacatgtgtgttcccaagggcaaagtggaagaaagcgaaccctttttatttgtcttgagtgtctctccccaatcccctaccctgttgttgtggctgacaataaagcatctccaatattactaatgagacactctggagaaatttggggacatattattcatgttcaaatcatcctggtattacccctttatagtatatgccaggacaagggttatacaatagaaacagaatgaatactctagtattttgagctactattggggagcaacaaacacgacctgaggagggagaagaaagacatcatgactgtcttcaaagctgctttctccttcccttttctttccttttatttgcttgtaatttaattagtgaaggccagtatctgaaagagctgccaagaaagactgctctgttgataaagtagaaagagaaagcaatttaagagtgagaaataaccacagccttggctgtgttattggacagaaaaccatcttttttttaatagcctaagtagaaagaaaccattaacagtttagcttctccaggagtaagaaaccctcattattttaataatttttctcagccaagaagcacccaaaggcattatgaaaggggtgataactgatgctttttaatatgtaagtgaacattctgtaggagagctgccaattctggcacctgggcagaacacagaggcaaggaggaaatttcaccacctcacagagcacaaagtgcagaatggaaaccaattttatttactctctgacctactagtctgtttccttttttatctaccatgtataggtttcacttactaccttttaaatacattgacttagtttatatctatgtagtcatacaggttatatttaaatgacattattcacagatctaaaaccgttcctggtaacaggcatatcaaaaggcaagcatatcacacagcgtcataactagacctaataatatgttgcataattgaaattttctgggagagatttcaagtgttctcaccacacaaactggttactaggtaaagtgatggatatgttagcttgtttgtggtactcatttcacaaggtatatgtgtatcaaaacaccacattatatactttaaatatatacaatttttatttgtcaatcatacctcagtaaagctgcaggcagggggtgtgggcaggggatccaagcatatcaaaagtttgtaacatgttcatctaggctactgttttcagtgtcataaaaaattgcaaaataatacagatacatagataaattagtaggtattgtaatttttttctttttttttctttgcaactattcttttctcagaaggctttttatacatagctattattaatacttcagatgttaataaataacttattgtgtctgctcagatttcttaaatgtattattattacctaatatttaatatttatgtatcacttaacatttaattattgataatatattattaaatatgaatgtttaatatttaatttattattatttaaaagttaacttattatattatatatatctctctctcatttaatgttggtaatacatttctaaaaacagacattctgcttgagaatgtaaatagagaggctattttccattattttaagagggaaataattacaatttacttacaacgcttgtcaatttctcaaaatgtaacaaatatacagaaaaaatgttttaatataagtaacaaatagtcttgccaaggtgtaaaatgcctaaagcaccacttctgctttctgatcaccaaaaattaacgtagttgttacctaccagataaagcaacgcagcaatatatgctcaaaaccagtagcactttcaatgtaccacttctttgctgacttttagggagcttttcaaaccatttacatgtgattctgatattcctccagttgtattggaagtaaaacctatagacttttccccttggggacttttacgttctgagatattaatatcatttttcctacatggtcattaactgaaactctaattaagagttagatgtataccattcagtttgtatcttaaaaactgaggggcattctggccgggcgcagtggctcacgcctgtaatcctagcactttgggaggccgaggctggcggattgcctgagctcaggagttcgagacctgcctgggcaacctggtgaaaccccgtctctactaaaatacaaaaaaaaaaaaaaaaaaattagccgggtgtagcggtgtgtgcttgtgggtatcatccaatcctttgagggcaagcatagaacaaaaaggccaagaaagtgcaaatttgctcgtttgagctgggacatccatgctctcctgtgcttagacatcagtgctcctgcttctcaggccctcagactgagctagggacttttacagcatttgatcccctgcttctcaggcccttgggtttgaactgaaattacactgctggcttttctgggcctctacctctagagaacacatgttgaaacttctcaggttccataattgcctgagcaaatccctcaaaaaagtcacttcctatatgtctttctatgtgtcttattagtttgtttttttgggggaaacatgactaaaacacctactttgatattttccactggaaactaagttaataaaaaagctttggggcattttgtttgcatccaattctcattctatttctctgctcaccttccatcatcctttctatgtttcaatctttgatgccaagaaatacatcttcctctttgtgttatccgtgaaagtaaaacattctctaaattttgatttttgaagcagcagaaaataaaaacagatgaggtagatacgttcagactccattcatcttggaagaacctatgtcttctgaaaagaagctgttttttggttatttttaattaaatttttaaatttattaacaaagtgccctaggctctatgttgaaagagcaaggcttcatatgaggatatgactctctatacaattccactgtttttaaacttgttcaatacctgtaaatcaagtgtaagttgcacacacaggatgccttatgttggcatgagcttgccattggtaggtctgcattttcaccatcctctttgttcattctcgctttctacagcagaggtgattctacatagaacaatgtgtgtgtatgtgtggggcaagttgtgaagggaggttggggaacataacagaatcatgagtctttccattgctgaacaaccagcatatcagtgaaagaggagtggcctagagtttgaaaaaattcagaatagaaaaggggtgactgaaaggaaagggatatttagtatcaaggaagagtcctaaaacaggcattaggacatctgagttcaagtccaacttcaatatttattagctgtgtgattgttaaaagataactaaattagttaatatttgtgtttaaaaacccaaataataattattaaagaaaataaaaaattaccataagtcccagctactcgggaggctgaggcaggagaattgcttgaacccaggaggcggaggttgcagtgaggcaggatggtgccactgcactccagctggcggcagacggaaactccgtctcaaaaacaaaaacaaacaaacaaaaatgtaaaacaaaacaaaacaaaactgagggacattcgtacagataaatacttctccatgaaaatataactatatgaaacgttatttatttttctattttattgcctctatctttctactcctaaagtacacccacagatacaattttagtcactcacagatgtccgcaattgactcttttcctgttattctctgtaattctcaggtaggttttctacacaaggtatcaaaaatggtccatagctttcttaggtttgcatgatttatgccattcacaagatcataagaacagagtgcttctctcttcccgaatgcacatccaatcctgaaaaagaactctgactccacttgagccatccatgcatctctggatgaattaacatgtgaaaggtcacagggtacacgaattggacaacttggacatgagaatctattcctgtacagatggggagtcaggagatgacaaggaggatttctagaaaagaaaaattctggatagacacaaatgaaaataacagattttcatcaaattccatgttcagggcagtttatccatgccgattaccctgaaagatatattgggaagtcagcactgaattctcatctttctttcctccttcccagatcaatacaaaaaagaattacattcatctaaatgtctttctcagatggcttgaatcattggaatgttatatgtcataggagattacagttcctacaataaagcagtgcattgacagggaaaaattaaatatatatgcaagctttcccaagatttctagttatattcatgtaaatttgggtcatctcaattcagggtgagtgattttgtcatgctttcaccacagtaagaaattcagtagtagattttctttaatacctttgccattatgtcttcgagcacatgggaagaggttttaagacatgcgttagatttttgtataaggagttcatgtcctttgtagggacatggatgaaattggaaatcatcattgtcagtaaactatcgcaagaacaaaaaaccaaacaccgcatattctcactcataggtgggaattgaacaatgagatcacatggacacagaaaggggaatatcacactctgggcactgttgtggggtggggggaggggggagggatagcatcgggagatatacctaatgctagatgacgagttagtgggtgcagcgcaccaccatggcacatgtatacatatgtaactaacctgcacaatgtgcacatgtaccctaaaacttaaagtatatataaaaaaaaaaaaagtcatgcgttagagaaaaaagaaagctgtttctgttgtcaaaagtaaatctcttattattataatttgttggtactgttgaattgtggcaagaaaacaaatagcacagaaaatagtaataccttatagcatggaaaatatttcctttttaaaaattagtatacttatactgtgatgaaattgttttccatctctacatggaaccacatatgtaaagttaggcaatcaaatattaagtaaaactttttcattaatattttattaggaggtgcatgaagcaaggttaagaagatgggggatgaagaatgatgaatggtaacatgctaaattctgttaaaaatgagaaataaggccgggtgtggtggctcatgcctgtaatgcccgcaccttgggaggccaagccagggagagcacctgaggtcaggagatggagaccatcctggccaacgtgatgaaacctcatctctactaaaaatacaaaaaaattagctgggcatggtggcgcatgcccgtaatcccagctactcgggaggctgaggcaggacaatcgcttgaaccagggaggtggaggttgcagtgagccacgatcatgccatagcactccagcctggcgacagagtgagactccatctcaaaaaaaaaaaaaaagagagagaaataaaataaccttttaggtcagatataataggtggtcacatgaaaattaccttcataagaaaaaggaaattaaagaggaactcaaatttttagtgtctgggaagtaacctgaggtgaaaagaggatagtgagaggtcaaatataggttatggaaccatgcaatttcagaaggggcttgattcatagtgtctatgtcataaggatctaattattcaatgtaggggactaatctacaaaacttcacataaagcaataattcccaatgcagatttagtggctgtttatttatgtctgtgttgagattctgaacttctatcacagtttgtcttactctgcagcttttttggtaaccaggcttctttgtcttaactctgattttgtaatttgacttaattttcctataggatcccatcagcatttaatttaccagttttcccttggttttcaacttcaataagattcatctttaaaaaagtaatttctttcagtctggaacattagcataggataaagaaaaaaactgaaaatgtcttatgtcctcaaaatcataacatgtggtaattttaatgatgttaaatatatattatcatacattggaagggctttaattcatgaaaattggcaggttgaccacaattatgtagttaaattctatttaaaataaaagggtcatatatgatacctcaaccacttttatcagttccctactctgttctcctttccccactcagttcaccaagcaaaggtaatctgaagcaataaagcaacactacagtcatcctacatactccaaagtatgtttgggcagcatgggattcaaaggaagaggccatcagtcactaagcatgaacagtagatatcagggccattgccatagctttatcaaaaatgcagtctaccccaggccttttaaaatttttgttacattgcattaatacacatttatgcggtacatatgaaattttgttacatgcagagaatgcgtaatgatcagttgaggatatttagggtactcattgatttatcatttccatgtgttgagtatacttcaggtcctatcttctggctaattttaaagtacaatatgttgtggttaactatagtcacctgcccttctatcagatgagaacttattccttctatctaactgtatgtttgtacttattaatccccccaatttttatgtctgtgttctcacaaggactattcctaaaggagggcctaattgctaaggtttagacaatgggagtttcttttggaaatctgtctttgaaagaggaaatgcttctgggaaggaaagggtagttggagattggagtggttacttttacatgtccacttggcttggctatagcaccctttattcaatcaaacgctgatctaggtgttgctgtgaaggtagtttgcagatgtgtgtaacatctacaatcagttgactttaagtaaaggagattatcctctgtactgtgagtgagccttatctaatcaattgaagccctcaagaacaaatggaattttccatgaggaagaagaaattccagccttaaagcctgtctgagagtttccagcctgccagcctaccctgcagatttcagacattcctatccagatcccatgatcatgtaagccaaggtcaagtccttgaaatatacctttttacacacctgccctccccaccacacacacacataggatatacctatataccttctattggctcagtgttggtctggtggatacagaaatcctattaattattcattttattcctcttatatcataccgacctcagcctgacaacataccagatttctcccttgttctaagctttggagggatagatgaaattcctgatacatcacgtatgtcctgatatgcttgatagaccttaagtatttatatttaacaaaatgaaaccatgatcattttgaagcaaaagatatctaaagctggaatgagaaacttaaatgatttctttatgaatatgagataatttacttggatgtcattcttagagtagcttaattttaaggatattttttcttctctaactatactaaatcaacagtggaaaaatccctaaactctggaggtgtttttatcttaccagtctatctaagacacactcaatcatagtcgctattgaatttggcatttcaattcttcactgtcacttctcattaattattggttctaatactgtctttgatgacttcttccttgtcattttacttcatgaactcattatttctaattgctattttatgccactttttggttcatcagtttttaatgttccacttaattggctccgttgtttaaatgatgtgaggaaaaatggggttaaatttatcatttatctgatacattctggtatgagagagcttaatttggttgttccattttctagatagaaaaagtaaggaaatattttctgcattctattcagattgttattgctgaagtcatcttatactatgaccttttaaaatattttcaaaggctttagaaaaaaattataggtacactgacatttgcttattgtgaaatgttatatcatgttcctttttatgttgtaatttgtagtattccacacgacagatttctctgttaatcgtacatcaggtctcacactcttataatttagccaagaattaaaaaaagacaagtcaaagaattggttttaacatgccaaaatatgtcagggatatatctgtggatttaaagttaaagaaaaattactagaaaaaattgataaatattaaagaagtatttaatgtttataatagtgcaattttttacataaaaaacaaagtttgtaaaatgtaagcagggatattttattgttgatgttaacttaatgaaaataaaagtatgcattttataagacaaagaatctaaatcatagtaaatctaaaaattcattgatttaaataccataatattcttaatttatgaaaccctccttctaacagatggaatttaaatgtatgacttggccatctatctttgactctaaatgtatttatatgagtcccacatgttaaatttattcctggagattatcatgaccaatagaagacttttacgtatgtgtcacaataagcatgaaataatgtgatctctttctcctttattatatacctttgcagccaccagactgcagtatgtgacttaatcccacagagatattttacactgaaagtttgtcttaagttgtcttgcaaatctttttgaactctatgcaaaatggttattctaattctcagagtacagccacaagctaggtaggtgtagatcgtgacatatgggcaaaaatatggtgggtgtcactggaaccacactggataaaaggaaatttatcatcgcaagtatcttaagaatgaaaaattttgaggcagtattttattatttgcaatgaatttatattagtgaactgacatataaaataaaattttatacagcatataattgattaaaatcacacatacttggaaattaagcccatgggaaagtttttgcaaaaacaaattttatgagaatttttgacgttggtaaaatatttataacaaaagttaatatttatggggctctctcagaattttcagtctaaatgtaataggaaaacaaattccaatatatatccaagaatcgtagagagcatggcgacaatatcagcacggatttccagttaaaaataaagagaataatgacttccagctccatccatgtccctgcaaaggacatgatttcgttcctttttatgtctgtatagtattccatgatgtacatgtaccatattttctttatccagtctatcattgatggcatttgggttgattctatgcctttgctattgtgaatagtgtgcaatgaacatatgcatgcatagatctttataatagaatcagcaaactaacgcaggaacagaaaaccaaacaccacatgttcttacttataagtggaagctaaacaatgggaacacatggacacatggtggggtaaacaacacacactggggcctgtcaggggcagtgggagggagagcatcaggaagaatagttaatgcaggctggggttaatacctaggtgatgggttgatctgtgcagcaaagcactatggcacacatttacctatgtaacaaacctgcacatcctgcacatgcacccctgaacttaaaataaaagttgatgaaaaaaatgaaagaaataaaatacaaatgaaatgtgaaagatggaactgttgctttgcacatccaattggctgaaaatagctaatactagttgctctgatgcccttttaattctgcatgtagagctataacttcatttcatggttagagattagtaaacataaaacctcacttcctaaatctctgatttacatctactgatgtaatagttgatattctaaagtcagaaatcttcccatactctctatctctactatgtgttttgcgagtcccctttttaaagaatcttgttcctcttaatgaattcagaaaagaaagaccatttaatacacatggcagcattatttgtcaacattatgttacaaaaatatgtttttattttaccagctttattatatggagtaattgacccacactaagctgcacttattgacagtgtacaccttgagaaaatttgacatatgcttatatctggtgaaagcatttactaaaatcaagatttcagacacgtcaataattccacaaagtttcttcctgccttttttaatcccatcctcctacaattcacctctattccaacctcagtcaatcactgatctactttctgctactacagattagttcaaatttcctggtatatatttgaattcatatactatgtattcttttttttcttctggattcctcactcagcatattttcagattcatccatatcgtagtgtatagttgattcatttgactatatgactagcattccattgtatgtatgtaccataatttgttcatcggtacatatggaaatggacattggaattgcttccaaatttcatctgttacaaataaagctattatgaacttttcttataaatctttgtatggatatatgctttcatttttcatgggtaaagtctacctaggaatagaatggctcgactaagtggtaaatgtttgcttagccttgtaagaaactgtcaaactgttttccaaagtggttgtctcattttgcttaccgacagatgtatctaagagttccagggcacactagcacttggtagggtcagttcttttttaaacgtgggccaatctaattgatgtttctcattgtggttttaacttttatacctgtaataatgaatgaagttgagcttcttttttttttaattatacttaaagttctgagatacgtgtgcagaatgtgcaggtctgttacatagatatacacgtgccatgatggtttgctgcacccatcaatccatcatcgacattaggtatttctccgaatgctatccctcccccaggtccccacactccaataggcaccagtgtgtgagcccctccaccacgtgtccatgtgttctcattgttcaactcccacttatgagtgagaacatgcagtgtttggttttctgttcttgtgttagtttgctgagaatgatggtttccagcttcattgtgtccctgcaaaggacatgaactcacccttttttatggctgcatagcattccatggtgtatatgtgccacattttctttatccagtctatcattgatgggcatttgggttggttccaagtctttgctactgtgaacagtgccgcaataaacatacgtgtgcatgtgtctttgtagtagaatgatttataatcctttgggtatatacccagtaatgggattgctgggtcaaatggtattttctgggtctagatccttgagggatcgccacactgtcttccacaatggttgaactaatttacactcccaccaacagtgtaaaagcatctctatttctccaaatcctctctagcatctgtttccttattttttaatgatcgccattccaactggtgtgagatggtgtctcattgtggttttgatttgcatttctcttatgaccagtgatgatgagctttttttcatgtttgttagctgcataaatgtcttgttttgagaagtgtctgttcatatccttcacccacttttttgtggggttgtttgttttttcttgtaaatttgtttacattctttgtagattctagatcttagccattcgtcagatggatagattgcagaaattttctcccattctgtaggttgcctgttcaccctgatgataatttcttttgctgtgcagaagctctttaatttaattagatcccatttgtcaattttggcttttgttaccattgcttttggtattttagtcatgaagtctttgcccatgcatatgtcctgaatggtattacctaggtttggtttttttctagggtttttatggttttaagtcttatgtttaagtctttaatccatcttgagttaattttttataacgtataaggaagagatccagtttcagctttctgcatatagctagccagttttcccaacaccatttattaaatagggaattctttccctattgcttgtttttgtcaggtttgtcaaagatcagatggttgtagatgtgtggtgttatttctgaggcctctgttctgttccattggtctatatctctgttttggtaccagtagcatgctgttttgcttactgtagccttgtagtttgaagtcaggtagcatgatgcctccagctttgttctttttgcttaggatcgtcttggctatgtgggctcttttttggttccatatgaaatttaaagtagttttttttacagttctgtgaagaaagtcattggtagcttgatggggatagcaatgaatctataaattactgtaggcaatatatccattttcgtgatattgattcttcctatccatgagcatggaatgtttttccatttgtttgtgtcctctcttatttccttgagaagtagtttgtagttctccttgaagaggtctttcacatcccttgtaagttgtattcctaggtgttttattctctttgtagcaattgtgaatgggagctcactcatgatttggctctctgtttgtctgttactggtgtatataaatgcttgtgatttttgcacattgattttttatcctgagactttgctgaagtagcttgtcagcttaaggagattttgggctgagacgttggggttttctaaatatacaatcatgtcgtctgcaaacagagacaatttgacttcctcttttcctagctgaataccttttatgtctttctcttgcctgattgtcctggccagaacttccaatactatattgaataggagtggtgagagagagcatcctagtcttgtgccagttttcaaagggaatgcttccagtctttgcccattcagtatgatattggctgtgcgtttgtcataaatagctcttattgttttgagatacattccatcaatacctagtttattgagtgcttttagcatgaagggctgttgaattttgtcaaaggccttttctgcatctatcgagataatcatgtggttttgccattggttctgtttatgtgatatattacatttattgatttgcatatgtcgaaccagccttgcatcccaggagtggagctgactccattttggtggataagctttttgatatgctgctggatttggtttgccagtattttactgaggattttcatatatatgttcatcagggatattgacctgaaattttctctttttttcttgtatctctgccaggtttttgtgtcaggatgatgctggcctcgtaaaatgagttagggaggaatccctctttttctattgtttggaatagtttcagaaggaatggtaccaactcctctttgtacctctggtagaattcggctgtgaatccatctggtcctggactttttttggttggtaggctgttaattactgcctcaatttcagaacttgttattggtctcttcaaggattcgacttcttcctggttgagccttgggagggtgtatgtgtccaggaatttatccatttcttctagattttctagtttatttgcatagaggtgtttatagtattctctggtggtagtctgtatttctgtgggataggtggtgatacccctttttcattttttattgtgtctatttgattcttctctcttttcttctttagtagcctggctaatggtctatctattttattgatcttttaaaaaaacccagctcctgggttcattgatttttttttttgaagggttttcttgtgtgtctgtctcctttagttctgctctgatcttggttatttcttgtcttctgctagcttttgaatttatttgttcttgctcctccagtccttttaattgtgctgttaggatgttgattttagatctttcctgctttctcttgtgggcatttagtgcacactactttaaatgtgtcccagaaattctgggacgttgtgtctttgttctcattggtttcaaataacatctttattcctgccttcattttgttatttacccagtagtcattcagaagcaggttgttcagtttccatgtagttgtgtggttttgcataagtttcttaatcctgagtgatttgattgcactatggtctgagagactgtttgttgtaatttccattcttttgcatttgctgaggagtgttttacttccagttatgtgatcagttttagaataagtgagatgtgttgctgagaagaatgtatattctgttgatttggggtggagagttctgtagatgtctattatgtctgcttggtccagagcttagttcaagtcctggatatccttgttaattttctgtctcattgatctgcctaatattgacagtagggtgttaaagtctcccactattattgtttgggagtctaagtctctttgtaggtctctgagaacttgctttatgaatctgggtgctcctgtattgggtgcatatatatttagaatagttagctcttcttgttgcattgatccctttatcattatataatgcccttctttgtctcttttgatctttgttggtttaaagtctgttttatcagagactaggattgcaatccctgcttttttttttctttctttccatttgcttggtaaatattcctccacccctttgttttgagcctttgtgtctttgcacatgagataggtctcctgaatacagcacacccatggtgcttgactctttacccagtttgccagtctgtgtcttttaattggggcatttagcccatttacatttaaggttaatattgtcatgtgtgaatttgatcctgtcattatgaggctagctggttattttgcccattagttgatgcagtttcttcatagcattgatggtctttacaatttggtatatttttgcagtggctggtactggttgttcctttccatgtttagtgcttccttcagaagctcttgtaaggcaggcctggtggtgacaaaatctctcagcatttgcttgtctgtataggattttatttctccttcacttataaagcttagtttggctggatatgaaattctgggttgaaaattattttcttggtcaggtgtggtggctggcacctgtaattccagcactttaggaggccgaggtgggtggatcacaaggtcaggagattcagaccatcttggccaacatggtgaaaccccgtctctactaaaatacaaaagattagccaggtgtggtggtgcgtggctgtaatcccagccacttgggaggctgaggcagaggaattgcttgaacccaggaggcagaggttgtggtgagctgagatcatgccactgcactccagcctggcagcagagtgaaactctgtctctaaaaaaaaaattctttgctttaagagtgttaaatactggcccccactctcttcttgcttgtagggcttctgcggagagatccgctgctagtccaatgggcttctctttgtgggtaacctcacctttctctctggctgcccttaacattttttccttcatgtcaaccttggtgaatctcacgattacgtgtcttggggttgctcttctcggggaatatctttgtggtgttctctgtatttcttgaatttgaatgttggcctgccttactaggttggtgaagttctcctggataatattctgaagagtgttgtccaacttggttccattctccctgtcactttcaggcacaccagtcaaacgtagatttggtcttttcacatagtctcatatttcttggaggctttgtttatttcttttcactcttttttctctaatcttgtcttctcactttatttcattgagttgatcttcaatctctaatatcctttcttctgcttgattgattcttctattgatacttgtgtatgattcatgaagttctcgtgctgtgtttttcagttccatcaggtcatttatgttcttctctaaactgcttactccagttagcaatttgtctaaccttttttcaaggttcttaacttccttgcaggcttagaacatgctcctttagctcggaggagtttgtactacccaccttctgaagcctacttctgtcagtttgtcaaactcattctccatccagttttgttcccttgctgataaggaattgtgagaagaggcactctggtttttggaatttttcagcctttttgcactgctttctccccatctttgtgaatttatctacctttggtctttgatgttggtgatctttctgtgtctggatgtcctttttgttgatgttgatgctattcctgtttgttagttttcgttctaacagtcaggcccctctgctgcaggtctgctggagtttgctggaggtccactccagaccctatttgcctgggtatcaccagcggaggatgaagaacagcaaagattgctgcctgctccttcctctgctgtatgttttgcaagtcccctctttaaagaatattgttcctcttaatgaatcctgaaaagaaagaccatttaatacacatgacactactataaaatatcatatcacatcatcctgtcaggatgactattctctaaaaataaccatactaacagaatctcttatacataaatataagagataacaagtgttggggagagtttgcagaaaagagaacatatgtatgctcttgataggaatgtggattgatgcagctattgtggaaaacagcatgaatgttcctaaagaaattaaaaatagaactaccatatgacccagcaatccctttttgggtatatatccaaattaaatgatatcattatgtagaaaagatatcttccttccaatgtttattgcatcattatccacaatttttaagacattggaatcaatctaagtgtccatgaatagatgaatagacaaataaaactggtatatgtacaaaatgagtactattccgctttaaaagaggtggaaatcctcttatttgtgacatcatggatgaactttgagaacattatttcaagtaaaataagccaggcacagaaagacaaatactacatcatagatccacttacatgtagaatctaaataaaataaactctcagaaaaagaatataatgcagcatttaccagagaccaacagcataggtgaagggactggggagatattggtcaaaaggcaccaaatttgagttagatggcaggaataattgcaagagatctattgtacaccacgctgactgtagttaataacaatgcattgtatacttaaaaatcactgagagaaccatgttctcaccacaaaaaattttgtaagtatatgaggtaatgcatatgttaaattgcttgatttaaccattcttcattgtatccatatatcaaaacacaatgctgtacaccataaatatatacaatttttaccaggcattttaaaaattaattttaaaaactgagagcagatttggaaagttaaaaacagaaacatgtctgcatttattctgaaaggaaagagaagtaaattgttaagtatcacttaactaagaaaaatgagaaagcctttcaaagagcaaaagttttaattttttaatctgctctttttctgccctctctggttttaatcaaatattttaaatgattccattttctatcctttcagcatttaaaattatgctttattttttgaatattttagtgtttgttctagagtttgcaatatactctaaatataaagctaatctgtgtatactttcaaataatactatattattttacagttaatgcacacaacttatagcagagtattaccatttcctctcccttataacaatgatgtcattcattttatgtatacatattctataatcaatatataattgtgattatggctttgaatgcaaatttatcttttggatcaatttaattttttatttatttattttacctttgtttattccttctgggacagtattcttttgtgtgtgtgtagatctgattttgtgttctagattatttttcttctcactgaagaatttattttaactttttttttaatagtatgggtcttctgttggcaataaatttccttggttttaggttgtcagagaaaagatttcttcatttttgaatagtaattttcctagatatagtattctagtttggtaaattttttccttcatcgctttaaaaatgttgctccaatttttcttgttgccatggtcttttaagagaaggctgatgtgtgtgtgtgcttgtgtgtgtgtgtatatatatatttatggtggtgagtaaattctttcagaaggtttatttgaaggcttctatatatatatcacatatagtatataatatatatatcagccttcaaaatacatatatataaagtatatatataactgttccttatttctctgatatatatggtatatatcatatatatatcagccatttatatatatataaatatatatttttattaactttccttatttctctatagtaaggtgtattgttttctacttgctgctttcaagattttgtctttgtccttagttttcaataatctgaatttgctataaccaaaaacagctttggattttttttcttttttttgctttatttttggtatttatcctgcttagtgttcactgagattcttgctctatggtttggtgtctatcattacttttagaagctcctcagccattattacttcaaatattcttcctcccttctctgtcttctcattctcatctactactcctattacatatatgctgaatattttgagatagtctgcagatcttgaaatttctattgtgtagctttttaaaattaatttttcttttaatttctgttcaaaaatttatattgatagatcttcattctttcttcagccatgtccagcttgctgatgagctcatcaaagcatttctgcatttctgttagcatttttttattcctagaatctctttttaattctttcttaaattttctttatctttacattatttacctgttagtacatgttgtctacttttctcattagagacttttacatattaatcatagttattttaaattctgtctgataattccaaaatctgtatcatatatgagtcttgttctgttcgttttatatcttcagacatttttttcctgtcttttggcaagacttaaacttttttgtttaaagccaacatgatgtattgggcaaaaggaacagagctctgtaagcagtcctttattttgaggtgtgacatcaatctgactaggatttgggctaattttaaagtctcttgtagctatacgtttcagtcttttatttcctctaatatccttgttcttgtcatttgttttatctttgagtttccctaaaaactccttcttaagtagaatgtgcacctgacagctctttcagctgtaatctacttttattatacaggaaccctgttgatatgacaggagggtggaagagaggggaagcattttataatcttattatcaaatcttggtagtaatgttatattcccatcctgatattgacaacatgtgtctactctctttttgttttggtcagtctagctagacgtttatcatcaatctatatttttaaaaaactagcttttggtttcttttatttttctattgtttttctgttttttacttcactaattttcatgctgatctttataatttcttttatcttcctactttatgtttaatttgctcttcttttttagttctttaataagaagataaagaccatgatttatgaactttcttctttcctagtataggtatacagtgttataaatttccaattaaacacagtttttgtcacatctcacagatttttatatatctgtattatattaattatattatattatattatattatattattatattatattatattatattatgttatattttttcaacttttaagttccatggtacatgtgcaggatgtgcaagttttttacataggtaaacatgtgccagtattgtttgctgcacagatcaacccatcacctaggtattaagcccagcatcaattagttattcttcctgttgctctccctcctcccacacctccacccctgacaggccccagcgtatgctgttcctgctcatgtgttctcatcatgcaactcccagttgtaagtgagaatatgtgatttttggtcttctgttactgcattttcagtttactgaggataatggcttccagctccatccatgtccctgcaaaggacatgatctcattcttttttatggctgcatagtattccagagtgtatatgtaccatattttctttatccaatctatgattgatgagcatttagataggttccatgtctttgctattgtgaatagtgctacagtgaatatacacgtgcatgaatctttataatagaatgatttatattcctttgggtatgtatccagtaatgggaaacctgggccaaatggtatttctgcttctagatctttgaggaatcaccacattgtcttccacaataattagactaatttacactcccaccaacagtgtaaaatattgctttctccacaacgtcaccagaatctgttgtattttgtgtgcctttattttaattgaatttgaaatactttctatttttttgacacatggattattgtgttatttatgtacaaatatgtggatatctcctagagaattttttatgaatttctaatttaaatctattgtggttatattgcaggacatatattgtatgatttcaatgcatttagatacattgagagttattttatggcctgctcacttgatttgattctgttttctctctgagtttcatgtaagacagtttttcttgctataaacctttgaacctctctttttaggtccacaaacctttcattttgcagtgtataatttgctgtaataccaccgaggatatttttcacttacccaattgcttttatcactacaagttctgagtctgtttaatggcatctatgtgtctttgaacatatgaggtagagttgtatttgtttccatatgcttgtccgttaattctaaaacctctgtccgttctgcattcattttgattgattgatttgtctctattagtagtcatatttccctgcctctttatatgtctgatgatttttattagatttcagttactgtgaattttatctgggtaattgatatttttatattttataaatattttcttctaggaagtggtcaagtatcaggggagtcatttgatcctttttgtctttttggaagagttttaggcagaattggcacagtgctcagtgtagggctaattattctgcactattgaggcaagaccattctgtgacctctacccaacgcaacatgattcatgaggttgtctgggatgcttggtggaaacatcactattcccagccctcttaccattaatcctttaggtgatttttttccctagccttggattgttttcttacacttgagtgctaatcagtattctgctgagcacttgacagggaaactctacaggttcccaaatttctctttaaactttgcagttctataattaccagtactcagccctacaaatgttaggtcctctgttcctctccgactgtcagttctgttttctcaattcagagagaactctggtctccaactggattaacttttcttcaccgtggcctcagaactgtcataaagcagtaaccatggacaaccataacgctcccctcatttgcttcccatttctgaagaatcactactctttgttgctaaatttttagtgccttaaaaattattgttttatattattttagttttttgttgttgttattttagtcaggagggtaaatcaagtcctcttttcttcatcctgactgaaagcaaagtctctgatagtagtattatcaaatacattaaattttgaaataattttgtatactttattaaaactttgagatttaatcactttgagattattacaatgtaatatatatgccctaagaactgtggggaaacttcaagtaatttaatatagacaattttgttatctgaaaattctgaaaccaaacatttaagtgagaagcaagaagaaaactcaatacagcacaaagtagagtataataagttttgttttgttcttcactttagctttttggatatacgtgctctaaaataaagtgttttgtttttctattccaattttagtataatgcttaatgcctgagaaaaaactggatagattacaagcaaaatagaaccttagcttggagaaggaaatcttgataaacacttttattatttttatttttctgagacaaacatcttaactcttctttaaaaattggttagtggtacttaactgatgaagagggctctcaaaatagaggaaaacagttatcctaccactgtgaacatttttctttcatacagtgcaatgtaacttttttcactctttttaaaaattaaaataaaattcaaagtcattaccattagttagaaccacgggaaatagcctcccagtcagacagatggctcaacaagcttcttaatgatggtattttccattctggatttctccacatagagaccaaaaaggaaaacaaagcaaaaaccccaggatatctgattcaaaattggaatagaaaatttcaataaagaataagaaacattggcatgtatttcagaatgcactttagaatcatttcttgcctgcccgtttccaccttatttcaggtcttcattacttttcatatgaattctgtactagccttctaggtattcccaattcctgacattcacagctccaaattgtttttcaaacttctgatagcataagtttcacatggcccaatttccataactttcaagtccctgtgtataagcattcaaggtggattgatttaattgtcacagctaatcaaaatttaatgcctgtttttaagaaacttgtcttcaactttcatctaaacttgtttgttctttatctccaaaataagccactagtctactcatgtcggacttaatctaacagccctattaattaccccactgatatggcttggatctgtgcctgtacaaattgcaattccaattataatacccagtgttggaggaggggcctgttgggaggtggttgtattgtaggggcagatttcccacttggtgcttttctcatgatccagtgagttatcatgagatctcgttgtttcaaagtgtgtagcacctcccccacccctctctcttgctcctactctggcaagtaaaatgtccctgcttccccttcaccttctgccatgattgtaagtttcctgaggcctccccagaagtcaagcagatgccagcgtcatgcatcttgtccagcctgccaaactgtgagccaattaaacctcttttctttataaattacctggtctcaggtatttctttatagcaatgagagaacaattcaatacaaaaaattggtatcaggggtggagtatttctataaagatacctgaaaacatggaagcatctttggaactggataacaggtagaggctggaagagtatggagggctcagaagaagacaggaagaagagggaaaatttggaacttcctagagagttgttaaatttttgtgaccaaaatgccaatagtgataccaacaatgaagtccaggctgaggacgtctcaaatgggaatgaggaacttattgggaactggagcaaaggacacatttgttacaccttggcaaagaccttggttggattgttcccctgccctagggatctgtggaactttgaccttgagagtgatgatttagggtaactggcagaagaaatttctaaccatcgaagtgttcaagttgtgacctggctatgtctaacaacttatgctaacatgagtgagcaaaaaaatgacctgaaactggaacttatatttaaaaaagaagcaaagcatacaaatttggaaaatttacagcccaatagaaaagaaaagtctgttttcaggggaagagttcaagcttgcttcagaaatttggataagtaaaaaggaaccaagtgctaatatccaggacaaaggggaaaaggccttgaagacattttagggaccttcagggcagcccctcccatcacaggcctgaagatttagaatgaaagaatggtttggggtgccaggtccagtgccccactgccctgagcagcataaggacatcactctctgtgtgcccactgctctagtctcagctgtggctcaaagggacccaggcacagcttggaccactgcaaatcataaatcttgatggcttccatgtggtgttaagcctgcaagtgcacaaaatttaagagttgaggcttgggagcttctgcctcaatttcagatgatgtatggaaaagcctggatgtctagacagaagcctgctgcatgggcagagccctcatggggaacctctatgagggcactgtggaggggaaatgtggggttggatcccccacatagagtccccactggagcactgcctggtggtgcagtgagaagagacccatcatcctccagaccccagaattgtagacccactggcagtttgcaccctgcacctgggagagccacaggcattcaacaacagcccatgacagtaaacatgagggctgaaccctgaaaagccataaaggtggagcttcccaaggccttgggagctcacctctggcccctgtgtgtcctggatggagacatggagtcaaaggagattattttgaagctttatggattaataactgccctgctgggtttcagacttgcatggggcctgtatcccttttgatttggccaatttcttccttttggaacaagagtatttgcctaatgcctatagccccattttatcttgggagtaactaacttttttttattttttttattttacaggctcataggccaacggggctagccttgtcttagatgagactttggactttggtcttttgagttagtgctagaatgagttaagattttgggggactgttgggagggtatgactgcatattgcaaagtgagaaagacatgagatttgggagggaccatggatggaatgatatggtttggatctgtgtccctgctcaaatctcagtcaaattataatcaccaatttcagaggtggggcctggtggtaggtggtttgatcatgggggcatacttcccccttggtgctgttctcatgatatgggtgagttgtgagatctggttgtttaaaagtgtatagtacctcccctgtctctctgttgctcctgctctggttatgtaagatgtgcctgcttcctcttcaccttctgacatgattgtaagtttcctgaggcctccccagaagccaagcagatgtcagcattatgcatcctgtacagcctgtgaagccatgagccaattaaaactcttttctttataaattacctagtctcaggtgcttatttatagcaatgcaagaatgacccaatacagccactaacagatttgctcattctgtattctagccgtgcatgccctgctccttctataaaatctgagccacctctcacatcccactttctgtggtattcacttaccaaacacaaaacagtgaatctatctctcttccaaacaggcattcattttcttctgttgttatttaatcatcatccatagtattccttacaataactgtccatcacatttttcagcctataggtatagcgtgcatttcccaaactcccatcctcccattcccactccatttcagcagttaagtaggattcaacttctcacattctactttagggagaatagaaggcatatcctttattttcctgtaattaaacatatccaggatcctttgctacccttctcccctcctattactatagcagaattattcttcctgttacctaaagccaattactccacctgtgattggttctcatccactcctatcttctaagctatcaatgatctcttttcccttttgatatttaccttctcctcgggtgagttcctcttactgtcttaaaataaaatttctcccattgtgctacatttctgcctctcacagtccctttctctatctacccttctgatcttcagaccagcatattcaataagctttttccactcatgtatttagataactccaagtcatttgaagctcagtatgcccaaaataaaatttacaatttcatacattccatcccactaaaaaaaaataataaaaccccacagcttgtctatttccagggttttctgtctcagtaactatcaccatcagcaagccagacacttagacatcataatttattttatcttctccctttcattccatgtagagtccatcaaaagatctgatcaattgtgtatcctaaataccaatgacattcacccccttctctccatctccacttctaccatttcagaaaagctgcctttattcatgactctaaacattttaatctgcattttctgtctacagcatccagccaagatcctgctaaagtgtccaatgacatctctatcgctaaaccaagggaaatttttgtctttatcttgcttgacctctcagcaaaattcagtactgttcatgatcctgtccttctagaaacactgttgatccttgtcttccatgaaaacttctaaatttttgcctattttagcctctctttttcagttctcttttttgacttttcaattttaactggaccattaaaactgaagtttcataagaagtctctctctctctttctctctctcgatcttctctatttctaccatttctcattagatgatcttattcatgacatgacttcaaagaatatttacatacactactccattatcttagctcattaacatctcccctcctgaagaaaagccttctcaatcttatagttaatgttaattcccctattaattactttcacaccttgtatgttcctttatagtgcttactgttttcaattataaacttatttacatgattattctattattattttttacaccattacactatttgttacatgagatatagtttcacatttttaacgttcattttattttttatttctatgcaaaggtcttagaactatactttaaatataacaaaatcagaaactaaaatatttccaaattagaaaacattgaatgttcaaatacataatattcaatgtactatattggttatgattgatagtcaagaaactctttacatttctaatgtctataaaaattaagcaaatttacctcataatacgtagtgtgaaaataaaatatcttgggtgcccagaatcactaaggaaaactcaagctggaaagtgcttagggcaaacctgcctcccattctattcaaagttatccctctgctcactgcaatagatgcctatgtgattgcctcctttggaaaggctagttagaaagtcaaaagaatggaactctttgtgtctcacctatctgtgacctggaagctccctctccatttcaaatcttcctgcctttgcttcaagttgtcccgccttttcagaccaaaccaatgtacttcttacatatgttgatgaatgtctcatgtctccctaaaatgtataaaattcataacctcgacgatcagcaagctatccaaaaaataggaggactattccagactttacccctcacttcctcctcccttattattggcagcctagttgtgttgcgggcgcattctcaaccttggcaaaataaactttctgaattaactgagacctgtctcagattttctgggttcccaatagtattgcttgcaaagcaattacaaagatgacagccttgatgtgatatattatttcctgttttacagtgtaaatgttgtaagctgtgacatagtaaatatgtttcagttataaggatcaatacacattctctcacaagttaataagtagatgtaatctggtgaaaaattaagaaataaatgtttaattgcattaaaatgatggttttcccaaaaaatgatgagctaacccacttctgtgccagcataaattaaatcataatactacaattctttttcctttttctctgcacaatacaattattgtgctcattgagctctgagagcaattatggtcaatgaatttattttctccataataaagaacaagatcatattagtacttgagaattcaatcggcataataggcctttcagtcaatgtattccttctcaagttgccttctatattaagatctcctttatacttatcacaatagaaaaaaatatacatggcatttcattttaaagcaactttcatctgcaaagtcatctgctatgaaaatcctattgaaacaacacagtaagtatcatgtatgtgtccttcttactcaaaggtatatgtaaatgtctatttggagaaaaaagtttgctttgaaagatcgctttccaaagagagcatgttttgtccttaaaatactgcacttttaacaaattgatagaatcagtcacatcctatcacatcatagtagtataattttctccccttcccttccctcatttatggatcatctcagaattttgcattctattcccctctttctatctttagaaaaacaataatacttgcttcattattagaacaaaattaattttagttgtcaatttgtgaaaactaaatgctgtggaagaaaaccaaaagaactgagagtagaatagcaagcaagaggcagtttgttctcaaccacctattagctaaagtgtctttaatccctcagaactgtagtttgcctgcatagaaaggaatgttttatatatgttatatatgtataacatgtctaatttcattagtaaagatagagaagttggtgaagtaattagctttaaggtttttgttcatttgtttgttttccaagacagaatcttgctctgtcgcccaggctggagtgcagtggcacaatctgggctcactgcaacctccacctcccaggttcaagcagttctcctgactcagcttcccgagtagctgggattacaggcgtgcaccaccacgcctggctaatttttgtatttttagtagagatggggtttcaccatgttggccaggttggtctagaactcctgacttcgtgatctgcccagcttgacatcccgaagtgctgggattagaggcgtgagccaccgcacccagcctagatttttttattaacctgcaccatagatatgctttgagcaaatctattcttctctatttacattataccaaaatgtttttatgtggcctaatatggtctaatattaatctgtgtcttcaaattaaatactatcatacatgatgcctttttctaccaaaagatctaaatcttaaaaatataataaatataaattaaaaaaataaatggagatggtttaggacttgtttggattcagtttagttctaccacttactatctataaccataaacatgttttatgatctctattaataactttactgtttattgtgttttcttctatataatagagcatttgaaaatttaagaaatatttaaaaatttaacaaaaaatttaacaaaattttaagaaaatttaacaaaaaaaaatttaacaaaaaatatggccaatatggtagctgctgatctgataattaaattaattcctaagatcaataatttctatacagtcatgtgccacatagccatgtttcagtcaacgttggactgcatatgtgacgagggccccataagagtataatgaagctgaaaaattcctatctcctggtgatatcaaagtgcattttttgttttccttataaatttagtgtagcctgagtgtacagtgcttagagagtctacagcatgtacagtaaagtcctaggctttcaggttcactcactacctatggactcacccacagcaatctccagtcctgcagcctccacttatggggcctgcctgtacaggtgtaccagtttttatcttttataccatatttttactgtcccttttccatgtttaggtatgtttagacacacaaatgcttaccattgtgttatgattgcctatagtttttattcataattagttaattattaattttttaatagcatagtagcatgctgtacaggtttgaagactagaagcaataggctattccacatagcccaggtgtgtagtaggttataccacctaagtttgtgtaagtacgtcctatggtgtttgcacaatgatcaaatgacctaatgacacacttctcctcatgtagccctgtcattgtgatgtatgggtattttaattgaatgatgaaacaagaggatacctccttaacaacaggaaataaaacacataaaggttatgtcaataaattatgccagacaaaaatgataaagtaacatcattaggtaaaaatgttaaataatcaaaaagaggtgttttagttttttgtttagtttaacaagtatttattaacaatgtaatatatagctagcttcatactatgctaccaggagtgtagaataagaagatggtaaactcttacctctgttaattattgagttagaaatgcaatacctgagcatcaaatccataatcttgcagaaaaaataagatttgccttttgcaatcccaggactttgggaggctgaggcaggatcaccaggtcaggagtttgagaccagcctgaccaatatggtgacaacctgtctctattaaaaatacaaaaattagccaggtgtggtggtgcatgcctgtaatcccagctactcaggaggctgaggcaggagaatcgcttaaacatgggaggtggaggttgcagtgagccaagagcgtgccactgcactccagcctgggtgacagagcaagactccatctcaaaaaaaaaaaaaaacattgtggtgagaatgtaagtttgaaagtaaacactaagaggcacatggcataatgctttgttcagtaaacctgtgctctggatagtcattagaatgaaaaatatttgttacaaccatctgagaaagtctcacaatagagttgggatttatataaaccttaagaagtgattggcttagaaaaagaaaagaatacccatcaccagcagaacatacaaacagaaaaccacaagaaaatatagagatgagaaaatgcatactgtttattgagtgacagaccaaaatacactgttgtctaaaagaaaacaggctttcaaaagtagtgaaaagattaggttgaactactgtgaaatgtcacatgtactgttaatatgtttttgaactttatctgaaaggtaatgtgaatatttttgattttttgagcaaaagcatttctctttgtttagtttgttgcccaggctggagtgtagtggcatgatcatagctcaccgcagcctcaaactcctaggctcaagtgattctttcacttcagcctcccaagtagctgggaccacagacacctgccaccatgcctagctaagtttttattttttgtaggggatagggtcttgcaatgttgcccaggctgggctcgaactcttggattcaaacagtcatcctgcctcaacctcccaaaatgcctggattacaggtgtgagccaccacggctgtcccaaaggcatttctatttttgtgtttcacagtaagtttaagttaaaaatgtactaaacacaataaactctatttttagattggatattatgctgaaactttgttttccttagattcattgtataatcaaaagataaggaaaatgacaaaaaatcttggcattcccatgagattgctttttatcagctgaccatctgaagacagctgggacaatagctggcagtggatcacctctacttctgcctggctaaaaataaatggtcagtgaaaattgcctaaaactctatcataaagatttgctcattttcctaggcatattcctattactctacactcagtgcatactgtttacttttgtgagtcttgctatattattattaaagtctatggtgatatatgttggctcatttagtttagtatcttaaagatcaatgtatctaactcagtaattttcccagtagcacaggtattgacgaatggcttgcaataacacaaggaaattttccttgaactctcacatattatcatctctaaaggtattacacactaattagaaccaaccttccttgttattttgttaactggagatcaatttgctaatcactaaataacagaaaagcatgacagggataatacatattgcctctgccttataatctccagacttggctgatgtcttggagcctgtcaggacttctggatttagagcacaggctaatgcagtagccttcatcaacaggcaggagacttgcctactggagaagcataaagatgagcatctcacactaccacagacaggaccttcttgagaagcagcaccatgctctgggcttgctttgaatgtttctttcccatgagatatgtgtgtacagctggtgctgggactcacgagtctctcgcttttggttaagtgtcataaaaaaagacatattttttttctatgcagatttgagaaaggaaaaaaaactatatttatgtttactctagaagataatttatcttttcttggaaaaattgtaacaatacaaaattcccatagcagtttcaaaatgcagaagttacaaaaaagtgaaattccttataaaatatccatgtgaatgccagaggctaattttattctctctcatggaaacaaaatctcaagtgagcctaatttattagttcattgatgttgttactatctcaaactaaaagacaaggggctttttctttgcagtaaattcaccaatatttttaaatcattggtcaaatgcattatctatttatttccaatatacaagagaaaaataaaagataaaagttctgtgcattaccaatgtacccatattctataagtgagaaattgaagcatagaatttattcattgtctatttaacattaagtaaatttaataaaagcaatttatttcaaaaataattctgacttggacctatgtggtccatcaaatttttctacttgcttttcttatgaaacattcacagtctttctgtgtgctgtttgttaagtatattttagtttaagtgtcctaaaactgatactgttatattttcaaatgtcatattgtagtatatcaggaatttttttttagaaatatatcatgggactagaattatggaggaaaaaaaatggaggtttaagaaaatgtcaatccttataagttagtattattaaattaatattaagaatgttaagaaaacatgtggttttggccaggcgcagtggctaaaccccagtactttaggaggccaaggtcgatggatcacctgaggtcaggggttcaagaccagcctggccaacatggtgaaaccccaactctattaaaaatataaaaattagctgggcgtggtgatacacgcctgtaatcccagctactcaggaggctgaggcaggagaatcacttgaaccaaggagttggaggttgcagttagccgagattgcaccactgcactacagcctggtgacacagcaagacttcatctcaaaaaaaaaaaaaaaaaaaaaagaaaacatggttttaaaggattatggttgtcataggtgaggagtctgaaagattgactgcttagtacttaattgtgagcactaacactgaaagttaaaggagagagacaacaaaatgggcaaacataaaaaaaacctcccctgctgtctcctttcttaatgattctagatctttgttagtaagtgtgactttttacgcaagtgcatggtttatggagtacattagtcagggttctccagagaaacaaaaccaatagaatatatatataaatacatatatatatatagagaaagatttatcataaggtataataacaacagtcttgcatgattaccaaagctgagaagtcccatgctctgccctctgaaagctggagatggaggaaagctggtgttggtatagttggaaggcctgagggacagagagctgatggcgaacattccactcaaaatttgactgcctgagaagcaggaatgagtgccaagggcatgagaagattgctatcccaattcaagcagtcaggcagagagtgaatttaaccttattttgtcttttagtcattttcaagtcctgaatgatttggatgatgtaaacttacatttgggcaaatgaagggccatatgctttactcatgcaccaattcaaataaatgctcatctcatgctgaaataccctcatagacatagccagaaatgatattttaccagccatctaggcatccattagcctaggcaagttaacatataaaatttactatcacaggaaaagactggaaaaataatataatcatcaggaaaggcttatctatataatttgtctggaaattttcttctccgggccaagttgtgcattgctttttgcatactgttacattgtatctttccatgccactctatcctcttattctgctttaatttctattagttcaattcacccccgacatagtatgaaagtatttccttagttgtttggttgtttataccttcctctcatccacattagaaagtaaactctatatttctttgttcatagaagtatgtcaagaaccaagaatagtgcatggcacacagtaggagctcagtaaataaataaatgaatattcatttattgaattaataaaagtatccaacattagcatttggttttaaccatataaccattccttccatcattgaaaatttagtttcccgaattgttgtagtaaaggagtgtgtttattttatatattggtccagttgtgcttttttggtccacatattaactggaaaacctaaaaaaaatagaattaaagtgagtcagtacaagtatgcaacaaattattagtgaagagtgtaacaaaactcaagtccgcagcatcagactgaatgcagattagggaggtgtttggcaagcttccatattaccattcacacatggggtggagtctagtgtaggatgtaatgtgcttgtggaagataaaacctgtactttctcaaggcgtactctctttggacgtcccttctgcatttgttcttgcatgcagaacacacaggtgaggaaagacgtgttgttgcctcacaacctggggcatcaaaatgcagcctatgggaatcccgaagtcaaggaggaacaggaatattctacttatttctgtcttcattgactgtgctggagagtcatgatgaaaaaaaaagacacagcctaacgcagaacaaaacaaaaatggacactgggcttttgcaatgtaaactgagcaaatgcgggctatgtgaaatggaagaattgaaagccctgcaaaagcaaactaattttagctattagacttagtttctgcatgtactacagatcatcaatgtctgaaactgctgaaaggtctctctatgagtaccttttttcccagggcagagcaagacaaaggattgtgtccaacagtacttacaagctagctttgaaaatcatgggtgtgagatttggtgaataaagtgggtgggtaaagacaactttccttcaattaggactctgaacagagagtgatttccctccaagcactctttgtttgggaaagattgcaaagctgtactcctaaatcattattgtggcagcctttacctctgctgccagacttggcatagattctgctggcttccagtgtgttgctgccaaggctgtttctattccttttattatatgttggctcattggaaactctcctggaaattgcccaaatgcatatatacaccatgccacaatgctgccaagttctctccctgggtgtctttacctcattaaagtatgtgcgactgtgttgcaagctgcagttctaaaaactcattttcaatccacagggctgatttatttaattaaacgatcaatatcgtctccttaactttttggtttcagtagttcactggagttttatttctactgctgtggtctctctacatagacacacgcttagaatttccttgataatggtctcccaaaaatgttgcaatggtagaccacaaaattagatgactttggtaagcaaagtctaattctacttactagagtttatgcatatctccacaaatatttgtgtcttatgtttgacttattataacaccgtgttttaagggaagatggtttaatgtctttctaattttcacaatacttccaaggcccctgatttttagagactccataaagggacttctacttctcagtggcctgataattacattgagtttatgtgttcactttgttgaagccacttatcccactgcaagatttctgcaagacctcttatttgttctctctctaaatgtgacccacaacaatatcatccaatcagttgggaggtgtatcccaaactcgttgaactattaataagttccttgtctttatggttgcctttactttaaaatataaactaaaactgtttaaaacttatgtctacaaaatcatttctctcataaaattttcctgtgctttcttcattgtgataaaagggatttgagtcgaagttggaatgcagggagagcacttaattttctgtttagttccaaactgacacaccttacccaaacattttataaactcatggccttggtccttaaattcagattaaaaactcacttccagtaaagcatgttcaaaattaatctctctataacttttgatgaatattctttccatttgtgtttgctgcttcttttttttttttttttttttttttttttgagacggagtctcgctctgtcccccaggctggaatgcagtggcgcgatcttggctcactgcaacctctgcctccggggttcacgccattctcctgcctcagcctcccaagtagctaggactacaggcgcctgccaccacgtccatctaattttttgtatttttagtagagacagggtttcaccgtgttagccaggatggtctcgatctcctgaccttgtgatccacccccctcggcctcccaaagtgctgggattacaggcatgagccaccatgtccagcctgtgtttgcttctttaccatggtctgtttttattattaggttttataagaatattatatttttcttgatccaatttttgaattatttggaatgtgtgttttagaatgtttatcacatatgtgaaaataaacttgtgggtgttatatatccacgaaaagttaaaatgaaaacatttttaaaaataaataaaattgtgggtaaaaagcaaagtaaaaaaaacatgaaatctgattcaagtcttaaaatatatgtattgaaaaaaactcaagtgatctataactccttatttctgagttgaaactaagaaaatgtaaaaataaaaaaataaaatatttgattaatctattgactttgagtgtctttctactcctccctctctttcttgatttatatacttgatttatatactacaatttccaaagtcttgaaataccttgtaaatttcaagatgctatgagagagggtactcagagataatgaaggaaaagtgtaatttgaagaacctgaactaataggtggtttttagtacctaagttaaagaaataataatatttgcattaggacaaactaagtacttaacaagtatcaactgcataataaattgataaattaattataattaatttaaaattcaaaataaacacattagtaaattaatttaattaattggttactttgtaaattaattggttaataaattagtaaattaatttaattaattggttaattaatttgatttccaaggtataagtatactagattgtattttaaaatgcacccaagatttgtattcatcaggtctagtaaaacatgcagacacagaaatgactggcacgaaggaagaagtttatatgcacagaactctagaagcaggagtcagtgcacacatgcagggccataggcagaaacaccaggtcagccaggaggcagagggagcaagcagaaaatgtgagtcagagctttaatgagcaaggcaggataaacaacttagaactggcaagtgtgaacaatttcagtgtactctagattgtaggggtttcctgagttgtctagtacctggcaatggagtgattagggcagggaaatattggcctggagcgtaagagcttcaaggcagtgagtgagctctggattggttaatttgcctaagaaagattcactcctggggagttgtttgctatctgtaggatttagctaactctgggggaacagtctcctccggtgtcaggaagcccacaaattgtaaaggtatcaaaataaaaagacatgctcaacaggttagataatttgttgtctattatttttgtttgctcaatttctctgttttggggtgagaggatctccagtccgtttagtgtagttctgggaaggcttttcaacaagcagccctatcatgcctgccattcatggttccccaaccagacgattcaagtctattcatatccaactgcgttaaacactgttcccttcatttggacttctcaagcataaggcaacaaaaagcttttattttttttcttcttaagaaattttaagttgtgtttatcaacttgcaacccaaataattgtaatgaaatagtttaaattttctatactagaaactataaccaataccgaggataaacactaaccaccaaccctgacctcaattaatgtcaagcgttcatgaacggcttccgccagttctacatagggtagacaaatttaattcctccttgtgggatacagaatgtaatctgtaatattataattgggatttaaaataaaataattttgatttccaaacttgaacctgtcgattaacttgtgttcatctattttcttttcaaatttaaaaaaaggcctgtgtaagtgtatgtaaatgaagggtgaaaaaagtaagttaaggtactaacgaaaatagtataaactagtgaacaaaaaataatactaagtggattctggcctcttctagtgcaatatttaaaataatcaataactggaaaaactagtgctggctttggagatcaatactgtaggaaggggatagacagcagtataagggaagcttaggaaattcttcatcatactctcttttgtacttattcattcctagaataccaagaaatgttataatgtatgcctcattttcccagctttcatttaaggacttgtaactcccagtagtctgaagataataaaagagcctttagcctttaactaaaaatactttccctatatatttcccacctcatctacttcacccttatagacttctgttcaaaaacatttccagagttctaaaaacattgttcttgcattccattttaatttccctagatgtgacacgttttaagttattcatatttaaattaggggacaattgcagatagtgcaagtttctcacccttatttaggactgctgaaatgttaaggagccatgttttaatgttgtagctttttactgaagtgctccatcctactctcatcatgtagcagcgggtcaccttgtcaatcaggagggctgtgttgacacggtggtgcctctacattactctctacttatagtaggtatctaagactccacaaaataatatgtataaaccctgtttcttttttttttttcttttttttttttttttgagatagagtctcgctctgttgcccaggctggagtgcagtggcccagtctcggttcactgcaacctctgcctcccaggttcaagcgattctcctgccttagcctcccaagtagctgggactacaggtgtgcaccactatgcccagctaatttttgtataaaccctgtttctaaaagctactctgaatgaaatgatgagattcctgagcctgttctaaacatgcagtgcccctacttctccatatatctgttcacagttatctgtcatagagatcctttgatactagggcaggagtccccaacgtttttggtgccagggacaggtttcgtggaagaccattttttcactgactgggagcggggagagggggtggtttcaggatgattccagcacattatatttattgtgcactttatttctattattattacattgtaatatataataaaataattgtacaactcaccataaggtagagtccgtgggagccctgaggtggttttcctgcaactagatggtcccatctggggctgatgggagacagtgacagatcattaagcattagattctcacaagtagcacacaacctagatccctcgcatgcacggttcacagcagatttgtgctcccgtgataatctaatgctgctgatgatctgacaggaggtggagatcaggcagtaatgggagtgatgggagtggctctaaacacagatgaagcttcacttgctcacctgctgctcacctcctgctacgtggcccggttcctaacagactggtagtggtccatggcccaggggttggggacccctgttctaggacattagtttagccctgctctttccaaagatttaatatatgaatacttctagatctttttgttttcttctagagacagggtctctatcacccaggcttgaatgcagtggtgtgatcacagcccacttcagcctcaacctcctagtctcaagtgatcctcctgcctcagcctcccatgttgctgagactacaagtaaacaccaccgtacatggctaattttttaaatttttgtgtagacggagtcttgctctcttgcccaggctggtcttgaactagtgatctcaagagatcctcctgccttggcctcccaaattgcagtattacaggcatgagccacaacaccctgcctcttaaaatgtttatgacatattttaaacaaaagataataaaaaatatattgcaaacatataaaaagatgctccacatcatatgtcatttaggaaatgcaagctaaaacaacaaggtaccactgcatacctgttcaaatgggcaaaatccagagcaatagcaaatgctggtgaggatgtgaagcaacaagagcattcattgatgatgggaatgcaaatggcatagtcactttgcaagacagtttggtagtctcttacaaaacaaaacatactttaaccatatgatatagcaatcacactcatttgtatttacccagaggagctgcataaaatgtgcacaaaaacctacatatgatttttcatatctttattcataattgccaaaactttgaagcaaccaagatgtccttcagtaaataagtggatgaataaactggtaaatccatgaaatggagcattgttcaccactaaaatgaaatgagctatcaagccataaaaagacatggaggaaacttaaacgtatattactaggtgaaagaagtcaatttgcaaaggctgtatactgtatgattccaactatgtgacaatgaaacaggaaaaattatggagacagtaaaaagattagctatttctagtccaggaattaggaaagaaagggatacatggatgaagcacagaggatttttagtgcagtgaaactactctatgattctacaatggtggataaatgtcattttatatttgtccaaatccagaaaatgttcagtatcaggagtgagccctaatgtaaattgtgggctttgggtgctaatgaggtgacattgtaggttcaacagttataaccaaggtaccattttgatgggagatgttaataatggaagaggttgtgcatgtgtgaagggagggcatatatgagacctctttgtatcttctgctcaattttgctgtgaacctaaaactgctctaagaaataaagtctatttttggtcgggcaaagtgactcacgcctgtaatcccatcactttgggaggccaaagcaggtggatcacctgaggtcaggagttcaagaccagcctggctaacatgttgaaacactgtttctactaaaaatacaaaaaattagcccagtgtggtggcacgtgcctgtaatctcagctactcaggaggctgaggcaggagaatcactggagcctgggaggcggaggttgcagtgagccgagatcatgccattgcactccagcttgggcaacaagagcaaactctgtctccaaaaaaaaaaaaaaaaaaaagaaaaatgtctattttaaaaaatactacaaaatttaaacaataatctattgaacacacacactcaccttcaagtttagtaagttaaaattaaaatcacaattatagctttctgtgtactcctcctactctgctcactttccttcaccaccaagggaaaacattctttaacttcttagtcattattcagatgtgtatgtgcacttttacctctggctatgctcatatgcaacttatagtgctgtttacctattttgaaaattcccacacagagtatcacaataatgatgagggttgtttatgatatgtaatgatgctaatttatgtaataatattgtatacattttcattttcattattctaaatattccatttaaattgaccactttttttttttttttttttttttgagatggagtcttgctttgtatcccaggctgcagtgcagtggcgcgatcttggctcactgcaacctccacttcctaggttcaagcgattctacctcagcctcctgagtagctgggattacagaagtgtgccaccacaccccgttaatttttgtatgtttttagtagagacggggtttcaccatgttgtccagtctggtcttgaactcctggcctcaggtgatccatcctccttggcctcccaaagtgctgggaatacagatataagccactgtgcctggcaaattgaccatttttaaccacctatttttttttcataaatagatattggttttgtcctaacttaaacttttacaattactaaaaattacaatatagcaataaacctgctgtagaacaatatgcattcttgaacataaacctaatgtaaaatagcttttgccataagaaataagctatttagctttgttacataatgctcaatcgctctctaatgttgatgtacaattttcagtactacttatagtattaggttggtgcaaaagtaatgcagttttgccattacttttaatgacaaaaaccgcaattacttttgcatcacctaatagtatataaatgtctccactgctccacatacttaccaaggtagtcaaatctggtaaagaattttatttttccattttcctcattaacagtgaaatgactcaggcatagtggtgcatacctgtagtcccagctactctggagactgagactggatgatcacttgagcccccaggtttgaggctgcagtgagctatgatcacaccagtgtactccaccctgggcaacagagcaagaccctgtctcaaataataatattaataatgatgaaatgagtgtgagttgttatgtttattggtcatttaggcttctttgcttgtgaatgtttaattcatatactttgctaatatttccatactgtttatcttttccttattgcttcatagtggccttactatggccattaattatggatatctatatttattacatatagtcccacctaaacttgtctctgcactgattttatggggactttgcattagtaggagcatttacacaattctttatgagttgaaatttttaaaatatcatgtaagaaattattctctattctaagaccacaagaatattttcctctaaaatttctccaaaggttttaaagttttgtcttttgtatgtatggaaattatttttatatatggtcggacttcagggatcattttgttttgttttgttttagtacaggtagcctattgttcgttatcattgattgaatggttcctttttacctcattgttttctaacatcacttttctcatacatgcaatgatctttcccagactgtctattcttcgagtctatttgtctattctggcaataacattaccgttctctttgtatattcgcataacttcatgatgagttaagctacctgggtagcctccaccttttttagcttcttaaacattgacttaattattctgaggcttctttgcttttgaattactctcaggcctccttacttctacatacattttagaatcggcttgctaagtgccttaaaaaattctgatggaattataattgaatgtatgaatatacattaaattaaatgtatggattaattgagggaacattgacatcattatgacattgattccttcaaaagtttatgaacgtggaataacttttccagtaaatgtttgatttatgctgttactttgtattttgtttctatattaaatagtatatttttcttagaactaattttttttatttagtactagtttatagcctagtttatagtgatcctgtattcaacaattttattaattctcgttctaattggcaagtagaagaatctcagaatttatttttggtgggggatgaggtaaacaaatctataaattttaaatactagtgtatttacaaaccatgtagcaaagatagcttttgcttcttaacaagccagccatctgggttgtgcagttctgattttggcagggctcctcatgtatacaagtgcctccagcagccagccagcaagccacgtcctcttcagagggatcggctgggaacatggtccactggcctctcatatctttcattgtcccccatctagctcagggtagctctgcatggtttccagagaaaagaggtgtgtgttgtctcttaatgtctaggctcagaactggaaaagcatcgtgtatgccacataattctggccaaataaggcaaaagttcagttcaaattcaagaaagaaaaattggctatacctccccttggaagtagatacaaaatcactttggcaaaggaacagggattacaggtaaagggacctttttacaatcacataatcacacctttgtttcttggtctcgcatatcatttttgttggctttctcgttagtttttacaaagtaagataatactttattacttattcttttggatcaagatttttgtgatgcttgttagaaattatttgtagtagaggagctgatggattaatagacaagagctttgactgtggtataaatcatcacatgaattgatgttggcaaagagtgtcaggctatctatgccaaagcctttgtattacttcttttttttttttttttttgagacgggatctcactctgtcactcaggctggaccacagtggcacgatcttggctcactgcaacctccacctcctgggttcaagtgattcttgcgcctcagcttcccaagtagctgggattacaggtgtgtgccaccatgccctgctcatttttttgtatttttagtagacccagggtttcaccatgttggccaggctggtctcgaacttctgacctcgaatcacccaccttcctcagcctcccatgtgctgggattacaggcgtaagccaccgcgcccagcctgcattacttaaatagacttttatgcacattttgtgtgtatattataaattttccatgctcctatacttcctgtttttattcttcacgtatacttctctaaagctaccttagttatgtgccgtgttgcacgtgactgcttcacctttcattgatcaattttgtgttggctgtttacattttctttttagtacagtagcttcatattttttctgtctccttttacccccagctcttactatctctttgatagaaagaaggagttaaataatttattaaatctcttttttttaactactttggtctacagatcctcctttatgtcagtcaatcaatctgtcaacagtatattttagattccgctgtcatagaagttaaaaatatagaatcaaacaaatgatatgatttctgctcccttaaagtttacactccaataagtaaacataattgtactatgtggaagagagtcacccatcttccaagcttgagagtctgtttagtattttctatgcatatgcaatctgagaatggccatgaacaggttgctttatcatagcacatggatcttttaggaggcattggggctccagttctcaaatttgctattcttttttcctcataccattaaacaaatctgagctacatgagaaaaagtgatttatcattttaaaaagtcatctgcattacttttacttttagatcaattttaatgcttatattgaatccaaatttgtccaccacttttgtaaagttagatttcttcgatggcgataatttatataagtgagtgatcagaccataagagagagaagaatgaagagtctgaactgagaagttcatccatattcttacccttcactttggaaagaatgagtctgcacagctcagcaggtagtgactcctctcatgcgttggcatcacatataagcatacatgggagtagacatataaactgtatggcccccagcaagatgcaccaccaccaagagttcaattgtctaaattgtattagcttagcttggtgtggtggcatgttcctgtaatccaagccactcaggaggctgaggcaggaggatcacttgagccaaggagtttgaggtcgcaatgagctgtgatcgcacccttgtactccagcctgggcaacagagcaagagtttgtctctaaaataaataaatctgattagtctgggagttccttgagagccagagtgcttgattctctttcagctccaatgtcccatcctagtgcagttcctggaagatattcagtaatagctggcaagagaatatgagaacaaattatatgtgtattgacataattttaaaaaactgctttctccttcaagcttgttttggttcatagatactttgaaaatgttattaatagcatgatccctggacatcacagatataagggcttgcattcaccagcctaattccaaatctattttctgagtaacattttgaaatagggcgaagcaggacaacgcttattgcaaacctcttggtccccttcaaggggactaacattgagggaaaatgttgtggaaaagtcagctgattttgaacaatgtattagtcagggttctccagagacacagaaccaataggatgtgtgtatatataaaagagagttaattagggagaactggctcacacaattacaaggtgaagtcccatgataggccgtctgcaaggtggggaaagagataagctggtagtagctcagcccaaagcctcaaaaccagggaggatgacagtgtagcctttagtctgtggccaaaaggcccaagggcccccaggaagctgctggtgcaagtcccagagtccaaacgctgtggaacttggagtgtgatgtccaagggcaggagaagtggaagcaagtgtccagcaggggaagaagaaagagagtcagagcaggagcaagaaagaggtagtgcgagaggaggtgccacacacttttaaatgaccagatctcttgagaactcactcactctcaggtgaacagcaccaataggatgatactaaaccattcatgccctcataatccagacacctcccatcaggccccatctttgacattggggattacaactcaacacgagatttgggcagaggcaaatatacaaactagatcaaacatttttaatgagccagatgtttgtcactgacgtcttctcaacgtcatctctgagcactatatgatggtttcttatacaccctggagaatgagtcttccctctcccctcaaaatgcagagattggtcaaataaccatattagtattgaatctacttagtcaaaagcaggatgggcccttctgcagcaaagggaaggcacatctgtttaatatgtaggatatggtgaatgtctgtttaatatgtagggtatggtgaatgtctcattcttgaatcctgaagtaggtttgactgcagatgtccagaagttgattgaagctctgctccaaaggggggagaaaaggttttgtatgattgagacagtttctgtaataagactacctgctacaaaatacttttagcactgatattattaaaatgaattaaatgggaagtcatattaaatagtttgatgagggttgaagttccaaatttctgaaaatgatgcttttactcactcatactcaccttcttcagagactttgctgctgttagtgacctagtaagatatgctctcacctctggtaggtggagaatcgcctgtgtaggtggcaggattaaaagatttattatcactttttcaccttcttcctgttaatctagttcttcttaggcccttctcctgatggtctcacttttggctatgtttcaacatccaagaactgttgatgttttattgtcactttctttagaaatgtggaaatgtgtcctgaaatgagaactttattacacttgatatggaagttacaatgttgcttacacctttaatgtgtaaagctctgaattcttgttcttgttttgttttttgctagattatctttcacagactggattataatctgtggcttttctaacacaaataaggcctgctcatatatcaagatatttcctaattgtttctgtaaatacatcagcaatcatttaattgacacctagtaatggtcatttcaaatgaatgttaatttattatgtcatctttctcaaaatgttcaaatcaatactataatcaatattttattgaccaaatgtgccatattagtgaacaaatccagaagtctagatctgattattatagttactttcttagaatacaattcagactttgatacaaaagctatagcccttgaacaaatcacatttcttagttttgttaaagacactggttgttaccatcgattaaaaatattattttattaagattttctctgaaagcaatgaataagatacactagctatcatgaagtttacaatctagtgtgaagtattagaaaaggactagtgagatccaggcaaggacagagtaagagagaagatataaacatcagaaaaataataaacatgaaattttcaaagcatggtgaaattgacatcaatgtctttgacggagaaaagtagacttttaagtttttcttcattagttctctaatattccactcatgtttagggcaccagttattggattcttgcatcttatgcagtgaaactgtcttttaaaattaatactgtagctctatagtttactagctattcattgtgtgtataagtagtgcaggagaaatgaatgtagaatgaagctaggctagtttttcctcttacccgtttaataaacaaatgttggggaaaatatggtcaaatatgaaaactgtagtgaatgaaagatattgaacccaggaacatgatatgcaaaaaatatgtaagaatagggtttcatagaaaatattttacccatttccattctcctatctgaaacatagtaagtatgtattaggaaatttagcctttcattaaaagcttatgttggaattttgttcaacttagccaagcatgtctaattagcattcccgaaagttgattggtgcggtgtagtagttagagttgcctgctgcagagtctatctctaactgtctcagacagcttcaatcctggctattccatacatatgctgactaagtgtttgggattcaactctagaaatttatcaactttttattttgtagatttcaggtagaaatacaggtcaatagtttaagatgttagttggcacttttatattttaaggccaatgaatatatagttcttttaatgtcctccaatttacttccaatttatttttacttatacattccagagccatataaaaaatatcctaaccttttactcttttttttaaagtattatttgtttgatattgcccagatggcaaagagttttaagcaatttttcacatgtttttgcctacattttcaaatgatgtgtcaaaatgacagaaattttgatggcactttattgtactgtgatatattacacttaatgtttctattttcacttaaaattaatgatgcacattgaagcccacacattctcttttagctaattcataatttcattcaatttggggtttttaattaataagtcttttttacttaagcttatttcttcactttttaaatgattttatttacgatttgagaaatgatgacttcggacctgatatatttatttgggtcaatgtcattggtattttctattaaaaaagcatattttaataggcaatgttttcatatttactatttgtgactataatttaaatttcaaattcttatcaaaatattctagtttgtgataatctcatcaatatgtagcatgattaatttgctacgtatattcatttctgcattttattatgggttttttggttacatatttctttagtcacctccaaatatttaatattatgcttacctaaatttttaaatcagctttgttcagccataattttagaataaaatgtaccaatttttggtataaaattcaacatatgtatggtcagtaatactagcaaaatagcttcgtcacccccaaaattgtactacttagctctttcctgtcaattagctttccctacctccctgaaactggcaaactctattctttctaaaataatagttttgccttgtaaaaaatatttttacataaacaaaaccatatagtttgcagccatttgtgtttcacttctttcacttcctataatgcttttgaaatttaaccatgttgatatttatatttgttcatctctttttatcactggtaacattccattgaatggtagcttagcccgtttgggctgctataaaaaaaatactctaaactggcttgcttataaacaagagaagtttatttctcactgttctagggctggaaatccaagatcaaggtgtctgcagattggtgtctactaagggctcacttcctaaacagctgctttttcactataacctcacatggttgaagatgtaaggatctccctagaccctgttttacaagggcactaatcccattcacaagagctctgcctaaacacctagtaacctcccgatggatcagtttcctaataccatcaccttgggagtgaggatttcaacatatgaatcttagggacacatgaacattaagataatagcaggttagggcccggcacggtgctcacgcctgtaatcccagcactttgggagggtggatcacaaggcgggtggatcacgaggtgggtggatcatgagatcaggagatcaagaccatcctggccaacatagtgaaaccccgtctctactaaaaatacaaaaaattagctgggcattgtgtcgcgtgcctgtaatcccagctacttgggagactgaggcaggggaatcacttgaacctgggaagcagagattacagtgagccaagattgcgccactgcactccagcctgggcgacagagcgagactccatctcaaaaaaaaaaaaaaaaagaagataatagcaggttagttcactacaatttgtctagccattcatcagctgaagaacactgttttctttcctatttgatcatattaaaatataccccaacagacaggcaagatgaactcttcatggctaacatgaggcacaaccaaacagaatcaaagggtcatggcagggtgaggagctggtcacatatccctgtgttactcagtactgtcacgaaattttctttcctgtaattaagcagaaaccagttcctaaagagccttgtcaaaacaactacagctagagtgtcccctctgaccctcacaagctcagctgacacctggaacctcctaattgaaagacttgtagtttctattgaaagactatccaacccaggctttgccccttatcctactgtttcccctccggttctgcagtcccatcacaaattctgattagacagggtattggtccttcaaacattctttcctgatacacaaccacaaacctcaagccagtttcggccgccttacacaggatgtacacaaaatgctttgaactctgtagttcaccttttaatgtagtcagctaaactccccctcattttaatactaaaactcaaccacaaagtgaacatagagtgtatgttacatatctgtttacccattgtgcatgtgcctgacttccctcataaatatacatagattttccccaaacccgctgaaaacgtatgacccaattatgcaaaacagaccatgtaaggcataaacatcagcctcaccctaccctctttagagaacacatttcacttacactgaaggctttgcttccccagtttgcagatttttttttaatatagaaattaaagctactccttttccctctgcaaatctcatgacttttgttaacatttctttggggacaacgatgggatcagaagtggcccccaagctccttcccagccacatctggaacaacacctgatgcctacaagagtcccttgaactcagttatcttctggctgctttctaggatttaagatctcccatttttaggttgaagccttgaaaacttttcttcaggaagccagttcattaggctctatcagccctgtggggtccactcacattttgtagggtacacttgcaatttgtgggtacactcgtgcttcctggggtgtgctcacatttcaggttttgctgtaatgctcacactaagggtatcagaagggacacctttgtcaggtccctgcaatgagtaatccatgtcccgaggggatggtctctgaccagctgccttcaggtacccaggtaagctttacatttaaaaactatagggaaaattcctgcaccttaaggctttggataaactcaacctgagaaagtttaaagccatgccaagacattttctgggactctgattggtaacatgtttaaacattatagggatcattcaaaccacctgttgttttaaaactagaataaaagattgctgctataaaattttacattttaaacaagatatgcttatcgcattgatatcttgaggctaggaaacaaagaaccattcaggactcaaagactgccttgctacaaaatactgtctcaaagctaactaaaactttttttcctttccagagctccccctccttcttttgacaattctgtctctttatctttctgtgagctaaactctctttatccaaaactcctcactattctgacatactatttagaaaaaacacttaaaaacccacaaagatataattcccatgtaaagacccccttcttatgctcaacagaatggcaacattcttaccttaagggcaaagaattgagtccaaaatctgctgcatagactttgttaaaataaattttatttatatatatatatatatatatatatttgttctctttacataattcagttagattttcacagttaactattatttgtccaattcagtatattgataactgcctcaaattgttttacccaaaagtaacctgttagtagtagctcagtagtagcctataaaagccctgctaatatttgttggtttttcctttctgtgtttcatctgaataatttacatttctatgtatttatatttattgatattttattctacagtttctaatcttctgttaatatcttccaatgtattttttatttcagatagtgtattttatctctaaaaattcaatttaattcttttcacatcttactactcattatttttatacattttaaaaatatgaattatacatctaatagatgttttagtgttcttttctgctaattctataataccttacatttgaaagcctatttctgtttattgatttttctctgttatggattatatttttctacttcctttcatgcctgtcaatttttgtttgggtgttgggcatggtagaatttatgtttttgttttctgaatgttttttgtagtcctttaaatattgtcgggctttgcattagatcacagttaagatacctgggaccagttggatccttttcaacaactgcttctaagttagaattgttaatttgttaggatgatcaaaaaaatcactcagtatagaactcttctgaggagttacaagcattatttctcttcaatacttgttttcttcacctaagacaatgctgtctcatgcaggcaaatttcagtattgggataaaaagaagaggttttcctcattgcaaatatccagggctgtcaatctctctactctccaaattttttcttataaattttaactaccttggtcttctgaactccaaatgtctcctcaactcagcaggaccactaatctctgttcagttctctgtgttttgtatttaagcgtaggaactctattaaagcagtaagctgaggcaatgatggggcttaactcatttgttttctcttattcaggaatcactttcctgtactgcatatttccgttgttcaatataaaaacaaaaatgaaagcataacaacaaaaaccgttgtttcatatattttgtttggttttctattattttaagattggaaaataaatctggttttcttcactgtaagcaaaagtcagatttttttaaaacttattaaaaatatttatttctctaattccaaatttgttatagagttgtttcatttctattcataccgagagtctgaatatcctaaaggttaagacaccaaatcgcctgggtgtaaatctctgctttgacaattacctcttaggtgaccttgaaaagcctccttggccaggctcatgcctataatctcagcactttggcaggccaagatgggtggatcaactgaggtcaggagttcaagaccagcctggccaacatggtaaaaccctgtctctactaaaaaaaataacagaaattagctgggtgtggcagtatgcacctgtagtcccagctactggggaggctgaggcaggagaattgcttttacctgggaggtggaggttgcagtgagccgagatcatgcctctgcactccagcctgggcaatagagtgagaccctgtcttaaaaaagaaaaaaaaaaaaaaaaacaaagaaaagaaaaggcttcttaatacctttgtgtctcaatttccccacaagaatagctcttcatagagttgttgaagggattaagttagttaatatagaaaaagcactaaaagccatttctatcatatattaagatattattatctctagttctgctatctagtcatgtacttatacataaagaaattagaaggctgggcacggtggctcaagcctgtaatcccagcactttgagaggcccagacgggcggatcacctgaggtcaggagttccagaccagcctgaccaacatggacaaaccctgtctctactaaaaatacagaattagccaggcatggtggcacatgcctgtaatcccagttacttgggaagctgtggcaggagaatggcttgaacctgggaggcggagattgcagtgagccaagatcgcgccgttgcactccagcctgggcaacaagagcgaaactccgtctcaaaaaaaaaagaaagaaattagaaccaatttttagtaccatcatatttgtggacacattttatattttactttgtcatttttacgttcattttaatacattcctttgttattttaaatatgaagaggctcactaatcttatgcctctattttcataacatttgaattcattacatacataacatctaaggaaaccaacttatacatttgacctcaatgaatcctcataatagttctatgagattaaaaccagtgatagctacactatgctgatttggggaataaagttagagaagttcagtgatgtccccaaggtcaaacagctgtctcctgaacactggaatacaaacccaattccctgtgattctagaaccttatctgttagtgactatgtgactacctctattaaatatcattataagtaggataaacacaatttcagttttccttcgcagagttctgcttcatgcctgccttgcagactgatttttatttaatagtgcccatggtcactcacaaaaagccaaatttgaatgataaattatatattcactgttatatacataacaggtattactgactgatgagatttataatgagcagctaaaacctagagagtgatttatacagttaaaggaggtgacgtctctaatgtcattttcctatgcttcagtgattttatcactttgacttttagagaaaaatgacatgacacttcacagagatttgttaaaatttagcagttagttattcagcctttcccattctgctggtagttacaaaataaggtagatattgaaggacagaggttaaatgcaggaagtgtatcttgtcagatgcccaacactccattcttgcctcctcagccctactcagataaaaatagaataattaaacttttaggaagaatctgtaatctagtggctctttaggggatggaaatgtgggacaagaaggagaataagagagagaaatgagtaaaacagatatgaaagagaaatgaagagccaacaattttttttttttttttttgagatggagtctcgttctgtcacccaggctggagtgcagtggcacgatctccgctcactgcaacctccatctcccggggtcaagcaattctcctgcctcagcctctggggtagctgggattacaagcgcacaccaccacgcccggctaatttttgtatttttagtagagacagggtttcttcatgttggccatgatggtttcgaactcctgacctcaagtgatcgcctgcctcagcctcccaaaatgctgggattacaggcgtgagccaccacacccggcctcagcaaagtttttaatcatgtcagaactgcacttatttttaaagctgcaaaaacataaataatctattcattcctcttagtcactactgaacaggtaaaataaaatatttagtattatcccacgcaaatgtgaaaaagagggtgaacgcaaagcattggctgttcccaggagagaggcaactatgtcattaaagtttgcataattgttttatccatgaagcaaagaaaggcagttgggctctttaataacaaaaaaggaaatactggatgatatactagtgactgtgaaatagttcagggactgtcatgcaggaaatgaaatgaaattgcctactttgaagtctcttgcctttgctgttctttctgcttgaaaatctttctccaaatacgcttatggcttaccttatcatagccactggaagtcattttttcactgagggcttccaaagttgccctacataacttgctaattctctctcacacacacgcacagtcacacttcctagctccctctctgcttgtattgcgtcatttagcacttacttctacctaatagagtatgtatttttcttatttttcttttttattacctcaaacctacctaaatgtggggctcataaaagcaggaatttatatctaatttgctcactgctaatcaccaatgctcaaatcagtacctggtaatggttaacaaatacttcttacattaataaatgatgaacaagatatttgtttggttttaacccaaagggttgaacaaaaatccagaaataaattggaaggtggcagattaggctcattgtaaaatattaggactacattctgtctctttatgagtaagtggctcctcagaacatgattctaacatacttgaagttactatatgatcaactgacagaagtaatttcaaaaattcttgcagattggatgagaggttgatattcttttccttagtacagagaaactttggttattcagcaaagggagaaaaagatgttcaaagcactacacacaagctacaatactaaaatgaagactagctttcctgtttaatcatagttctcgttagtttatttctattactcaatctaacttgaaaacttgcttctgtgaaacctgaaaaataaaaattgaaccaagagagaaggtgaaggagatatgagttctgggagcagtggtggagaacaagaaaaacaaaggagaaacagcaactcatagagccttttttgcattacttattgagacagatacagtttacaatgctgacatttgtcttgagaaagagaaagagaagaaaaaatttacttatgacatgttttatttttctaaaactttgaaaggttcaaaattatctttatgcaggtttcacatattaatttaaaatcttactgactttgtgaaacggtacaaaaatcaacaacaacagcaacaaaaataacttgaactcaataaatgccacttgaatcagcaaagacccacgtgtgtggttctgtcaaatccccttgctgcaatagctctgccaatttacttgacaaatgtgtagccctggactttcaccccttgtttaacagaacaatttgaagatgatactttagaagtctttcagatcattagatggttatttttgcagaagcaaaggagagagaaggaggtgctacacacatttcaaaaaccaggtcttgtgataactcactcactcactcactatcatgagaacagcaccaaggaggaggtgttaaaccattcatcacggaccacccgcatgatccactcacctcccaccaggccccacctccaatattggggattacaattcaacatgagatttgggctatcagcttgggaaaaaatactatcagcttggaaaaaaaactattttgtactttgcttttttaaagcacaaaaataaataggagttatacatttaacattttcaacattcaggaaaataaaatattaatttctctttttcataaaccaaatgcattttaggctcagttcttctctatctcttatttcatggctactactgtgtttttccaactaggccaagagtaaaacattgctgaatttttataataatacaaacctcattccctatatattttcacaggaaaaaaaatctttttggcgataaaaaaatttcatcattaccctgatgtcatgaaattatattctgctgaattgaccagagaaagacattgtgcataaggcatggtagatccattaaaattcaaataaacacattcaattttaaggtgaaatttgttcatttgcatttttttataattagtagtcatggaggataatactttgatgacatactaataaaaatacatccacaataatgtattattactagacttctctttatttctaacaacataacaaacactgtgataatgactgatatggtttggatctgcgtccctgcccaaatctcatgttgaattgtaatccccaatattggaggtggggcctggtgggaggtgagtggatcatgcgggtggtccgtgatgaatggtgtagcacctcctccttggtgctgttctcatgatagtgagtgagtgagttatcacaagacctggtttttgaaatgtgtgtagcacctccttctctctcctttgctcctgctctggcagtgtaagatgtgcctgccttcctgtctcctaatcatgattgtaagtttcctgaggccctcctcagaagcagaagctgctatgcctcctggacagcctgcagaaccatgagccaattaaacctcttttctttataaactacccaatctgaggtaattcttttttttaaattttattttattttaagttctggggtgcacgtgcaggatgtgcaggtttgttacataggtaaacatgtgcacgtggcttgctgcacctatctacccatcaccttggtattaagccaggcgtgcattagctgtttttcctgatgatctctcactcctccccgtctcccactagtccccagtgtgtgttgttctccttcctgtgttcatgtgttctcattttttgactcccacttataagtgagaacatgcagtgtttggttttctgcattgctgtgctgaggatgatagcatctggctccatccatgtccctgcaaaggacatgagctcattcatttttatggctgcatagtattccatagtgtgtatgtaccacattttctttatctagtttatcattgatgggcatttggattgattccatgtctttgctattgtgaatagtgctgcaaccaacatatgtatgcatgtatctttatagtagaatgatttatattcctttgggtatacacccagtaatgggattatcaagtcaaatggtatttcatagcactgcaagaacagactaacacaatgcctttttgcacacattatttctaattatcaaaacaactcagacagatcataatctttgatttacaaatgaggaaacttaaactctaaagattaattggaagctcatatagcaaaaagggaggtatgatcagaatttgaaactaagtcttattgattcagtagttataatatttattagtagttatttggtaatatcaatgaaatggataaactggttagctagcctaaccaaaaattaaacaaacaaataaagaagacacaaattactaataccaggaatggaagaagggtcatcactactgtctcatagatgcaaaaagaataataaaggcatattatgaacaattctatgaccacacatataactttgatgatatgtaccaattaactgaaaagcacaatttgtcaaaactgacacaagaatatgtaattagaatagctctatatctatttttaaaattgaatcaataattaataaccttccaaaaaataaagcgctaaaactgatggtttcaatgttggatcttaccaaacatttaagaaagaagtgatagtaaaccacaatccccaaaaaataaaattggaaaggacacttcctaatatattctatgaggcagcattatcttaatctcaaaatcagataaagacattacagaaaaggaaaacaagggaccaatatctctgatgaacataaatgaaaattttctcaacaaagtatgagcaaagaaaatctaacgatatataaaaacgtatacaccagggccaagtgggatttgttgtagatttgcagggctggttcaacattcagcagtcagttaatataatgcaccatattaacagatgaaagaagaaatatcacataagcatatcaataggtgcagaaaatgcatttgacaaaatgcaatagccacttgtgataagatatctcagaaaactaagactagaactcactgaagttggaaaaataaaatctataaaaacctatagctaacagcatacttaatggtagaaactggacaatttctttctgtggttgggaataaggcaaggatgttttctctcatcactcctattcaattctatgatggaagtcctagaaaatgcaattaaaagaggaagggtaatacaacatatagagattgggaaagaataaataaaactgtgtttgtttgtagatgacatgggttgtctgtgtaaaaaatcccaaagaactaacaaaattactcctgggactaaaaagcaattactgcaagattgtataatacaaccttataaatacacaatagtcaaattatatttatgtatagcctgtaataaacaaatataatttgaaattagaagcattttggttcaattatacaaatatatacaagatctgtatgagtaaaactacaaagctcagataaaacaacaaagatatctaaataaaaaaatagatgttccatgtttatgaatagaaaggcctaatatagttaagaagctaattgtttacaacttgatctagatacaaacaatcgcaacccaaaattctagaaagtcattttgtggacatcagcaaatgactctaaagtttatatgaaaagaaaaaagatgcagaatagccaacacaatactgaaaaaaaggaaaaaacttataatactaaactcctggagtttataaattacataaaggtacattagtcaagacagtgtgatacaggcaaaaggctagaagaatggaagaacaggtcaatggaaaacaatacagagctcagaaacagacccaaacaaataccattaactaatctttgagaaaggaacaaaggcaattccattgagaaaggataatcttttcaacaaatggtgctgcaacaactggacatgaccagagcaaagagattattacagacctaattaaggactttggacctccagacaaacgcaatctttgctgagaatggaactgcctgtaagtaagttctaaagatgtgttctgcagcctagtgtctacagttaacaatacagtgctgggcacgtcaaaatttgttaagaaggctcatctcatgttaagtgttctcgccacaaaaacaaaaacataggggcacaagaaagctttgggaggtgacggttacatctgtaacctcaaatgtactgatgctatcacaggtgtttgcatatactgaaactcaccaaattgtccacattaaatatgtgtagttatttgtatatcaattacacctcattaaagctgttaacaaaagaatcaatgtgatgatttgcataggagaacatacataattcaggttataaggcaagaaaggccagtgggaatgtgaattcctatgatcacctcacacaaattaaatatggggttctagactctgagataaattccagagcgctctcactaataactaattgatcgcctaatgatctcttcagtgaaatgaggatttcttgaagaaatacatgagtttgtaatgactccctgcctgctgaaagccttccaatccccaaactgagtggacccagtgaagacaaaacagtgatatatttcttttttttttaattattattatactttaagttttagggtacatgcgcacaatgtgcaggtttgttacatatgtatacatgtgccatgttggtgtgcggcacccattaactttctaccccatcacagcaaagaatgaacacaaatggttatccaaaaaaaaatcaaaatctttagacatattcctgaagagacataaagaaatagttccttagggataagggaagccctaatgagaaaatgtcacctacatctcaaggtagttgtcagagctagattaaagagctattgatactctacaattcccagacttcctgtgggcaaggcttatgaaaggcaacaattggggaaaagttcacttcttcctactcagcctgaggcatatttcccacagatcggttgattcatttggcaaacttttatggagcaccaactatatattgtactatacactacactagaatcaggagattaaaaagtatgattacaacacagtccatatcctgagaaatagtcccatcctttagaatcttaatattttttctaaaacatgatttggtggacagtctgtttctttacttacgtgacatatttcatataaactatagcagaaaaaaagatactatttaagaacgaagactgcagccagattgcctggtttccagttttttttcatctcctcactatgtgacctttgccaagtttcttgcctcctcagtgctttatatttctcatctgtacagtgcaatgtataatatactgagtacagtgtcatagttatctaccttgtaaggttgctgtgaggatttaagtgagttaaaacctgtaaagtatctaaaccattctaggcgcatagaaagttctagagccatgtttgctgctgctgctatcacccgtgttattactgttgttgccgccgtcgttttcattccaatgggttacaggctgactgatgtttatataatcaataggaatgttatctcaccatcccatggcacattaaccacagcaactgttatttagtagctacgtctgtactgagagcctttcaaagatttatatctattaccaaataataccttgctgtagggacacagatccacaaatattagtgactttgtgacaatcactaatatctcttcaggcacagagttttgaagttctttttttcaactagagagttatgcaaatattatgtatactcactgcacaattaaacctaattattttaaaatgcaaaatgacggacattgcacatcatctcaccatatttttccaaataggatagcataggtgtaccgtcaactttatgacaagaatatggcagagctgtgcatcctttgggagagatttcctacaattacttaaattccttacactttaactcctcggaatttctgtagaggaagaaaagtgaaatctgtaactattatgccttctactctgttatatgctcccatctctgtgaatcttgatttaagctgagtgcatcgttaatctttaatataacccgagaacaatagtcaaatagaataatgagtggtattgaagaaatatatagaacagcatgcccagaaatgcattcaaccactccatatcttgcattattagacacacccactgacttgcacagatccagaatttttaactctttgttgaaagcaagggtaggcaaaacttattcataacagaccagataatataatatgttcagctttgtgggccatatggtctctgtgacaactactcaactctgctactatgacataaaagtgatcatagacaatatataaataaaacattatggctgtattttaataaaacttcatttatgaacagtaaaatttgaattacacgtaattttcatgtgtcacatgtattattttccttgaaatttttttcaaaaaattaaaaatgcaacaagtctttgctcccagaccatacaaaaacatatggcaggcttgatctggcttacaggctatagtttcctgagccataatgcataggaatcagaatattttgaatttaacaatttaaccatggaactgcaatcattacctagaagattagctaataacataaaatgtctcaaggcatgcattaaaacttcagtcttatttttctcatttatttatttaggattctaactttaagaacagaaatcatgggttatgatttcacatctaccactgttagtttgctagccttcagtgaaaatttccaacctctagcaacctctttttcccaaagtctgttatttgggagatggattatatcactactatcaactcacactatgtatcagaatcacctgtggagaaaccaaggccgaacactcagagatatggcgtcaacaggtgacaccaacctgcatccagggttggaaaccactgggctactgagctccagacctctttctgtttgataagtttaagaatttctattctgtacataccgttgacacaaatatcagtaataatgtagcattacttcagagaatattaaatttaaataattagtagaaaccctttgcaaaaaaattcagaactattgaacttctcctccttcacgatggcaaaatcaaaaagaaaatatatatttaactccttttagctcactgttgagagatggacagaatagaaagaaaataagtaaacaaatcatatgtatttcttttcccaatagctagagcatagaaaattacagagaaataaagcagcaataatctgaaagcttctatgtattcttattctcaagccctatttccttatttagggggttttgtagttgaacaattgcagcagtatttctctgcttccagtttcattattgaaaagacagttcacacaaatattcaaaaataagcagtctacattttcataatatggttcattttttcctaacttttagtacatttcacagtcaatatcttgtgtatactcatgttagtgactcaattttcaactgtcagcttcacaaaccgtcatcaaaaaaatcagatgatcaagcagagcttggttgttcagacttcttacagtaagggacacacacgcagacacacacacacacatctaaacacacacacacacacaccttcttgattaaaaaacagtaatgttccaacctttgggtaggaaatatttagggttttataacctgagcagaatgattttaagatgagtgtttcaaaggaggaaactggttgaaattaggtatagtttttgaattactagatctagattagtgatcacagtgaggagtgggtcttaaagggggatttgataagcaggctgtccttacagtgaggagtgagtcttaaagggggatttgacaagaagatatgtcagcctgccatatgttttcatatggtctgggagaaaaggcttgtggctgcatttacagtcttgtcttcaacaattaaatatttcttgcaacaagtaattaagacatttttgcttgattccaatattgtttgacatagggacatgtaaatatgttcatcatatatattgcttaacagaagggcagaaaagtatgcctggacctggcatgacttaacacagagagaaaaaaaatgtttgtattaatgctcactgacactttttgtcatgcttttggtcatgcctaagatataccattatcttatgaactaccttagtctgttttgtattgctacacacaaatacctgagatgagtaatttatagagaaaagtggtttatttagctcatggttctgcaggctggacagttcaaggacatggccatgatttctggcaaggtcttctgtgctgcatcataacatggcagagaaggtcaaaatggaagcagttatgtgtgaagaggaaaaacctaagaggcatcctggcttgatagcaactcattctcaagggaattcattaagttccatgagaacttattcagtcttgccagagtgagaactcattcactaccatgagaagggcactaagccatcaggagagatttactccaatgattcagacaattctcactaggctccacttcccaagactgccatttcagggatcaaatttcaacatgaggtttggtgggaacaaactcaaaccaaatcacagcatgaggatatgatcaatgcagatcaaaattactgtctgatgtattgggttcactgtgtcaggcagaatggtgtttccccataggagcccgttttgaagcctccatagcttatgtatatattagattaaatagcaaaggggaattcgaggtgatagatggatataaggttgcaatcagctgacttcaagacagaaaatattagctgactttaagacagaaaaaattatccagataagcaaaatataattataagaggacttccagcatgactgttggaaaaattattccccagtgaaactggtaaaaattatttttttttaaaaaacaactttttataacccctggaaatgatcctaaaggaatacagcaaatgaagaaacatccattcaattaaatctagtaatattcagaatgaaaagcaggagtgtgtagtatttaagcaaagtccactctccattgccctcccagttcagagatattatcataagatattaaaaacaataagatttaatagctgacttctccaatctagacttccttagccaagaacaaatggcatcttctcccacagcttccagttggagagctttcttctagggcagaatgcaacatccacatttcttctcctactgccagttgtctcctgttgctgaggttgtttcaggtgagaacagttgagaggcaaggcccccttcttcaccccaccctccactcatggaacagagactccatttcgggcacagtacctttaaaaatactggagccccagttgccttaccctggatcataagtttccacaccaagaaaaccaactcatgaagacctcatgctacaatctccacttccattgggcactcaggttcaaaagtaggagcatcactcagagaaagtatcccatcatctcaaacctaaccacagaggcctaactcaatattttactagagggaaaagcaggccataaaactaatagctcctagtctcttcccaaagaaattgacttcacttgcaacagagcacagggaaattctagcctatagacatggaggtcatggtgaaaagcaactgggagaaaatagattcaagacataggctgaacggtaagccagttcgtttgtaggagagaacctgagaaagagaaaacttagagaaaaaaatatacaacactgatctaagaacctccttcaaagaagcccaaatctgattgtattagcctatagagcaatttataacccaggacatagttgaaaatagtagagcaatcagcctccaattaatggggcataacagtttgctatcgtcagggaaagagatgaagagagccgtaccaaacccactattgtctcaaggtgactgtggacataccaaaagctgtgccccactgaagattaacatcagaggtttaacagtgtggggtaggagaaaatagacatcactaaaatattccagccctgaaagggaggagactcatatgcaaagttgccgtaatatattattcaagaggtctagtttccaacaagaaaataattaggaatgcaaagaaatgggaaagtatgacatataaaatgaaaaaagaaaaagcaggcaaaaggaactgtgagagcagccagatatcaaatttaacaggaaaggcttcatggtagccattttaagtatgttcacagattgaaagggaactttgtttaaaaagtaaaggaagtcatgatgacgatgtccaacacaagacaaagtatcaataaagagataaaaattattatggaaattctggagctgataaacacaagaactgaaatgaaaattatactagatgggcccaacagtagatttgaattggcagaagaaggaatgagcaaacttgaagatagactcattcagattatgcaagctaaaaaacagaaaacataaaaaagagaaataaggagcctcagggaaatctgggacaccattaagtgcatcaacatccatgtccatatccacatcagacacatcatagtaaaaatgcttaaacttaaaacaaggagaaaatcttgaaagcagcaagagaaaattacaacaaaacaaaactcctcactttcaagggaacctcaatacgatttaacagctgacttctcagcaaaaacaatgtaggctggaaggcaataggatatcatatttaaagtgttcagttaaaaaaaaaaaaaagcaaaacctgtcagccaaaaatcttatatcaggtaaatctatctttccaaaattaaagtaaaataagaacattcctagattaacaaaaactgagagaatgtgttgctagcagacccaccttacaataaactctaaaggagtttcttcaggctgacgggaaataaccctagataataatttgaatacacatagaaaaataggagcttcaataaagttagttatatgattccacaaggcagtataaatctatatttttctttttctcttgatttacaaagcagttgtataaaataatatgttacaatgtattgttcggtctgtaacacagaaatgtaataaattggtaatatgtttgctaatgacagcacaaaggaggtgggtgagaacaaacctacattgggctaaggaaatgactgcagatgagtaagttaataattataacaaagtatcatgagtttgtaggtttgtaatattaatacataaatatgtataataccagtataacaaaaataggggaaaaagaatagagataatgtcttaggcatctcaggctgcaataacaaaatgccatggactaggaagcttaaagagtaaacatctgggccaggcgcggtggctcaggcctgttatcccagcactttaggaggccgaagtgtgtggatcacgaggtcaggagattgagaccctcctggctaacacggtgaaaccctgtctctactaaaagtataaaaaattagccaggtgtgatggtgggcacctgtagtcctagctactcgggaggctgaggcaggagaatggcatgaaccctggaggcagagcttgcagtgagccgagatcgtgccactgcactccagcctgggtgacagagcgagactccatctcaaacaaaaaaaaagagtagacatctatttgctcacagtttttgagagtagatgtctgagatcagagtgtcagcatggttgggtgctagtaagggccctcaccctggcttgcaaatagctgccttctcattgtgcttcgcatggcagaaacaaagtggattctgggctcttcgtcttataatggcactaatacagtcacggatgcctcaccttcagaaactcacttaaacctaattacctctgaaaggtcacacctcctagtgccaccacattgaggggcagggctttaacataagaatttgggcaagacacaggcattcagttcataaagagttatatagaaataatattccaatatcttactagaattaagttagcataaatctgaaaattaatatgatagttaaaatttatgtagtatgccctaaagaaaccacttttttgaaaaactcaaaagatatagtaaaaataaataaataaatttaaatgcttaattagaaaatattatataatgcaaaagaaatcagtaaaggaacaaaaacagacaggagaaacatagaaaatagacctttaatatacctttatacctaaattacctttaatatacatgcagaaatccttaacaaaatactagcaaactaaatccagcaacatataaaaagaattatataccatgaccaagtaggatttatcccaggaatgcaaggttgattaaacatacaacaaataattaatgtaatacattatatcaatagaattttaaaattacatgatcaggccaggtgctgtggctcaaccctgtaatcccagcactttgagagatcaatgtgggtgaatcatttgaggtcaggggtttgagaccatcctggtcaacatggtgagaccccgtctctactaaaaatacagaaattagctgggcatggtggcgggcacctgtaatcccagctactcgggaggctgaggcatgagaatcgcttgaacctgggaggcagaggttgcagtgagccgagatcatgccactgtactccagcctgggcaatagagggagactcagtctcaaaaaaaaaaaaaaaaattacatgatcatatccataaacacagaaaaagcatttaacaaaaccctatatcatttctgataaaaatactcaataaactaggaatagaaggaaaccttcctccacttgataacgggtatttgtgagaaacccacatgtgacatcatccttgatggtaaaaatgaatgctttcctcttaagatcaagaaaaagaggacacctactctcaccacttctattcaacacagtttttgaaggtctagccagagaaattaggggaaaaaataaaatgatccaaattagaaaaaaataagaaaagctatctttattctcagataacattgtcttgcatatagaaaatcctaagtatccactaaaattataaatacccaatgacttcaacaaggtgataggacacaatagtagtatcaacaaacatcatttgtatcccatatatttataacaaacaatccaaatatgaaagtaagaaaacaaacccatttacaatacaataaaaaaatgctaagaaataaatttaacaaagtagtactaaagttatactctggaaacggcaacatatttttgaaaattaaagactctgtactgaatggaaaggcaacttatatacatgaatcaggatactaaataattgttaagatggcagtactcctcaagaatcccagctgacctcttgcagaaattgatgtatttaaattgtgcaacctggaacgtttagcctctcttaacagagattgatgtgtatagagcacattacaaatcttccagaccattaactggtctatttctacatagcagctttaccagcttgaaaagatattttgcacaatgctttttaaaaacatacaaaaaccaaatatgagtcttattcttaatacttttactattcaggaaaataaaaaatgaatttgtgtttccataaaattattttattttaggctcacttcttcttaattattttatagatactacagtagttttccacttacaaaagaaaaagttgtcgataaagtggaggcaggagacccacaatagtcaaaataaccttgaaaataaagaacaaggtaggagtacttcacaatttcaaaacttcctacaaagcaatgacagtcaacacagtgtgatgccagcacaagaacagatgtatataccaatggataagaattgagagaccaaaaataaaaccatacatccataaccaattgattttaaataattcaatgaaagacggaatagtcttttcaatacatggtactgagataattggatagccacatgcaaaagaatgaaataagacctctattttacaccatatacaaaaattaactggaaatggatcaaaaaactaaatgtaaaactataacacattggagaaaatatttacaagcttttatgtgacaaatgattgatagatatgactccaaaggcaggaagaacaagagaaacaacagaccatttgaacttcattaaaataaaaacttttaacattcaaagaaaaccatcaagaaagtgaaaacacagctcataaaatggaagaaaatatttgaaagtcatgtatctgatatgggtcatgtatctagaatatataaaatctcttacaactcagcaataaaaagacaaacccattttgaaaaggtaaagaatctgaatgaacatttttttcacagaagatacaaaaaatgactaaaaacacatgtgaagaagttcagtttcattagttatctgggaaatgcaaatgaaaccacaatgaaataccacttcacacctgctatgatgactataatcaaaaagacagataatcagaaaggttgacaaaaatttggagaaaatagaatccccatagattactagtggaaatgtaaaatggtgcagtcattttggaaaacggtcttactgttcctcaaatgattaatagagtatcctatgtcacagcaagtccattcctaggcatatacacaaaagaattgaagacagatattcaaagaaatacttgtattttaatatgtatttttaagtgaatgttattatagcaatattttattgttatttattgttatagcatcattatactatgatttccaatagccaaaaggtaaaaataatccataaacaaagtatgagtatatccatataataaaattatatttgaccataaaaatgaagtattgatagatactgcagcacaaataagccttgaaaacattatgctaagtaaaaaaaattcagtcccaaaagactatataatgtatgattccattcgtatcaattgtgaagagtagagaaatttatacagacagaaagtatatcagtggttgcttaggactgaggatggtgggacgatgggagataataaagaaaactaggagtttcttcttgaggtgagaagaatgttctaaaattgactgttgtgctggttgaacagatctgtgagtcattgaattgtacactgtaactgagtaaaatgtgttacgttaattagatcttaaaaaaacttaaagtaagtagaagatggaggcaaaggatgcacagttgaataaagagagtgatgacagaagcaaggcatagtgatgcagtgtgagaaatgcttagcctgcttgtggtggcattgaagatggaggaaaagggtcatgagacaaaaaccatggaaagcctccagaagccagaagcctccagaagactccagaaaaacagaagaaatgggtcctccactagagcctctagaatgaaatacagccctttgtagttagcccaagtgaaaaccatgttggacttctgacctacagaattataaaataaatctgtgttgttttaagccactaaaagtatggtaatttgttacagcagccatagaaaactagcatggattaactctggtggtcattttaatatgccagcttggataagctacagtccccagttattcagggaaacactaatctatctgctgttgtgaagatatttcacagaagtgattacagtgaataatcagttgactttaaatactggggatcatcctagataattggagttgacctgattctattagtcaaaaggcatttaaaacagaactagaaatttcctgaagaagaaattctggatgtggacaaaaaattcaccctgtgcttgagagtatgacaagcccttcctgctgtcctgtctacagactttggatttgcctggctggtcctcaccattgcattatctaattgcttatgacacatttttaaatacactcctggtccttgttctgattctctgcttcaaccctaactgacagagtcacattgggagtgtttggtggtaactgttccaatagctctttgtgtcaatttgttgtataatcatctgttagaacttttcctgggaaggcagctgcatagcacttatgacaatgattgagcaataggacatcagtctcctgtgatcacacatttgagcaccataaccatggggaacactatgagaaggcttatgataagagtccatagttaattttgaagatgaaagtcaagagagtcatattaaagcaagagaataaaactcctcatttattgctcacagaaaaagatgtaaccaaattaatttaactggttgttgacaaagatatgtaattttatgtctttgttttgtgagcctttttgtagattaaggcaacctgagagagatgaagctataagcacaatagtcctctaagacaacaaatactttactcgcaaagatcggtgataaatctaagacacttttattttgaaccattccctgcctgatttcatgccagagtgctaaagccatagtgacatgatctagttgttcttctattctatgaattctagtcaggatttttcttacttttagagaatcataaaataaaggaaaaagccaaaaacctttttcaattattaaaattttcaaagtccaagtttcaaattttttccttcttaatttaaattatctaaagatatctttttagtagggagaaaaatagaggctgaaagagatcctgggtgaaatcatggatgctgtgtgacagtcttcagatcatggatctcgtgaggataacagccaatatgttgcatgcctcaaatccaatatcagccattagtgactagtaatttgttttcagctagaacaccacatattctattgtgaaatattattttaataattttctgtcattcttcaagagtcgtcagcatcaggcagcattaattgtagtatagaaaaggtagagccattgtacaatgtggtgattatagtttaaaacaatgtatagtcattcctcttttatccacaggggataggttccaaaatccccactggatgcctgaaaccacagattattctaaaccctatgtaaaatttttatttttatatacatacatatctatgataaagttgaatttataaagtaggcacaggaagagactagtaataacaataataaaatagaacaattataacaacattctgttcacaatttaatgggcagaaaattcatttttaccatagatcgtagaaaactcagcatgatttcttttctttccttattaagtagagaactttcaccttgtcacttacaggagatgcctaacagtttctctttgacatatctgaattgtgctttagggacatcattaagtaaaataaggattacttgaacacaagcactgtgatactgccacagttgatctgacaagcaagatggctaccaagggcttaacacacgaataccacatacagcatggatacactggacaaagggataatccctgtcccgggagggacagcatgagatttcatcacgctactcagaaaacttattaatcgtttagttcttgagttttctatttaatttttttgactgcagtttactgcaggtaacaaaaatcatggaaagagaaactgtagataaggagcattactttagtatatacttgaaaattggtaagagagtagattttaaatgttctcagcacaaaaataagataagtatgtgaggtaatggatattttagtttgatttagtcattccacaatgtgtgtgtgtgtatgaatatgtatcacaaaattatgttgtacaccataactatatataatttgtatttgtcaattaaaaaaataaacatttaaagataaataaaggagacatttgctcactataaaaaagaaaaaaaaactttgggtacatctaagtcaataaatgaagttgaaaatgtagtatagctctcttataagatatgtaaaagtaatacagcctccaaatatacattatctatttccttttatttttccgggtctgtttttctgaaagttctgttacaaaggctggttgctacaaagtcctctttctaaatatgatgtataggtttaatcctgaattttaagtgtagaaaaaagagaaatacatataaagataaagaataatagcatgcagattaaagtatatgacaagctatgtttagattatttgaatatcgttctgtgtgccttggatcaacaacttcttgcagttgccaacttgttacaaagattatgggttgaagctgtcacctaaagattgtccacttctagaagattctttaaaatcctcattttgaggtttctagttggaacagttttctaattctttgaggatgaattctcttctcctagtaaagtatatccaagaaacaagtgtacttttagagttatgctaactagttacagtacttgatgagatgttttcattagagttcaataaccctatctggtatctcttccagaagacaagatcttaacatttcagaccatgtaagcattatttaggaggatgttgaagaaatactgtatgtattgatgatgattaggtgcattttatgagttctttgcagtatcagaggatgtctgcttgaatttgaccagaatgtagaatcagagtaaatttctaggtgtaagaggcagtctgatttcaattcagaatggaagaacaaataagatcctaaaaataggcaatttctttgtcattaaaaacaatgccaatactctttggattcctataatgtctgaaagctttgttgatgttttagcttaagaattaattgttccttctatcatttctgaagattgggataatatgggcagtaaagtttctgaataagcagcaaagtgttgaaaatcttgttagtgacagtcccagtaaaatgggtatctctgttactgcagagataggttggaattcccagaatgggataacaaaatcaagtggtatttttgctagtatcagatcatagctctttcaaagaaaagcttcaatccatcaccagaattagaaaacactgacaaacatattcaaaatcagttgtggaggatagtaggacaaaacttacttggagatgtcccgagacatttttctattttttagctatttttcatttttcttctttataattttaccaggactatgctgctggcgattggtgagattttcatcagcggcatcgtcaacaatttgggtcaaacgtttcagtaatgctagttgactactgcagccaaattgtccttgctatagtcagtcaatgctttcattaaaattttatgaaagtttctattcaagattctctggtgccaacaaactcctgaaagggccagagattattctcatgcaatttgcaaggatgtttttttctggtatttctttctgacattggaatcaaaactagctttaaaccattcaaagtatttggcctcttggactgtcctgagagcaaggatttttctcatggttttctacctaaacagccatgaattttactttaacctctatgttatttacttttgtgtacattgttgacattcccagtaaaatgcaaaaaaaaaaaaaaagaatgtttatctgaaggacactaaagaaggtagaacacagatttacaactataatgtaatgcagaagataaaatagtacttttattcaaaaccacaagagtggaataactattttattatgtccttgaggtgcttcatacatcaatatcctctccaggtgactttcttccgtaggaagacaaaattattacacagataagtgcaagctatgatgagctcctacttctttagactttgaaatattggtttcagtgtttctttagtgtctagttttagatgtgttgtgcaagcttgtagaaagttatggttgcaacaatctgcaccattatgggtgcctaatggaggaagcatctgatagttttaatgtaaggtcagtaaaacatattctagatccatttatgcttttgtccaatggctctttcaaaatattcatggaggtgtgagagatgtggttctcattgaggtgtttgcttgcatatcatattctccatttaaagctgaagataatttccctcatcaaaaagactgatcctaaagctagtttcacatgtactttaggatcgactgcttaatactatccaaagacatttaaatgcctatggctgatatctccaatgggctcattcttcctttgcctataggcccaaattttattccagactattttcatagaagagattggaggtagccttcaaaaaatcttagagttgttaaaatgcatactattatctccaatgggctcattctttctttacctataggacaaaatttgattcaagtctattttcgtagaaaagacattggaggtatccttgagaagatcttaaccagtatgtatagctaattccagtggtttttgatgtaataagtagactagggtagtcctctgaggacatgctgaggaacttcccactctaccttttccatttcatagcttgtacttcttgtacttaaggtctctactacattaagcaaaaattggtatagagtataaagctctacatcttcttagaactaaattattctgtgaatttgtgaatttctttctttcatgtcttggctttggaaagttctttacaagaatgagactagggcttaaaatcagccctaagaagctactctaatttgaaagaggcaattgagttgtgagggtttcttgtagagcagaagggaaaggaagtaggtcagaagtgggggggtcagagtgtgatgtaggatcataatggaaggaaaagaaatgtggaagaaatctagtagatttgaaatgtgatttaggaagataaaagagaaagatagtttcatgtttttttcacattttttcttctgacttagctacacatttttttacagaagtaattttggaatctgaatttttttggaagcttcccctagtaataaaaaatgataaacataagaggtttggaattttgcccctgttttgttctaaggcacttctcaaatgaataatttttttcatagcagaagcccctccccccaaatattcattgtaatccttaattatctttcaagaaattacggtatttagaaagacaaatacctaattagtgttatagtatggacacgtaaaagaaggtgaagtctgtcccggagatggcatagactgacaatctgataaattcataattcttctcgtgttcaggagttttcaaaaagtttcttcctgaaccaaactgtcacagaagaatttagacaagactgtggcaaggtgtaaaaaggctttgacagatagcccaatgcaaacgttttccataacgcctgtctgacatggctttctgaatttatcagcccttagagtgagcttcaatgaatggatttattaggtctatgtccaatctcttctctaagaccttggtcttataagcttatatcagagtatgacaaagaccttcccactccatcccctagaaaacttaaaaacacagcagtgtattacgagttaaagacgggacccctccaaggatgggaatttcaaacctggttacaaaatcaactaattccaatatgcatagaattgaaagaaactaagcagtttggagcctaggaacctgaaaaaaaaatcagagctcagacccagtccaaaacttagctcagtacagcagttgtagaggctcctgggaggatgttccaggcaccttcacagagaatgttgtttaggattgaggatctcgacctgtggtagtgagggggtttcaaatggagctacaaaacctccagaattaccaactgttgaatcctccaaagaccaggaaaaaaacaaaacaaaacaggaaaacactgatcaagcaaaactaaactttaaagacttactgcagtcagaataccacctaacagagtcttaacagtatttcagtaactgaatattagaaaaaagtaggtataatctcctagggcctgagctgggcttttctaaggcagatctttcaaatttgagaattaattggcattgacagaatttgtgacttaataacttcaaattggtatatacagcaagatgaattgagttttgagcagcatactactagcattgataaataaactatttcagttggctcactcttatcttccaggaatgaatattttctggggaaagcaactaagttatttttgcttggcctcagtgtaacatagaaacagaaaaattacctgaacccaatagatgtattttttaacacaaagataggaattcctgttggtttcagttctttgcataaagcattggtgtcctcaacatatcaaatttatttctcccattgtttttaatgtatttttcccagttatccattaaaaataggttatcttttcagtggttactaatattgccttccttccatcaattacaatcatcccatgcctctgattttatgaaaagtttcttaacggtagaatttaggatttgagaaacatttattattttgaatgtcactgaaagctctacaaagtgaaaccaaagtaaaaattgaggatctgaatcataattaatggagatttagctcaagtgtttacccagatccttcccctaatctctggatttcaagtgaacacaattgcataaatccctttaatggtccatttttatgctaaatgctctgctttcctgcttctttcctacacgcctacactgccacaccaaattcattcaagaccaggtcgccctatctaaatccctcttccccaaccatcagggcagattggttaagaaggtacaaaatattaaagagattgggaacttagctgattttattttccttcagctggtgcccagagtgatacatcataagattcttggcttttctgccttctctgcttctgaaaaaccccaactaatcttttctagatcctgacaatcctcaggatctctaagcagcttcctctcccaaagtgcaaacaccataaacagtagtatctctttatgcctcaagcagaggaatgctttctgcctggatgacatttttttagttgaccgtgatcttaaggagaccataaaactcttggttccccaagggtaaacctttgctttgagccatatccatgtatctcttattcaagatgttatttcaacttccttactggcaaagaagactatggtgtgtcacctctccaagagacaagagaaaaactgtcttgcatgcctaaacactatggtcagtaacctctattggccatttaaacttctgaatacctcacaacacaaatatgattattcttactatttgatacttgagaaaatagcacattagaatgttaaaaagctacttttggtcacattgctagtgagtaatatggacagaattggaaggctatgctctttttattacactgctatgtcatcattggtagaactttcatgagtccttaccctgcataagcatcatcattattatttttattattatcatcatcatcatcatcatcattatcacttattctttcacttctcacagttattccctaggctactttctatttaaggaggtaggcagactttctctccatttccttatttgaggatcacaatctctttacttcaagataatttaatattactttgaatctgggggaagtggcatgtaaaggactaagctttatttatgttgagggtgagagagagggaaaacttacaagcctaggatcaacaagacaaagttggcatcttccacagaaggagcaccaaccttttttgttgtttttgttaattagtagacttttttgagcaatcgtatgtttattttaaaaactgagaagaaaatagaagtttctgtatacaccttcacccttcccatttcctctatttttttttttttttttttttttttttgttggagacggagtcttgctctgtcacccaggctggagtgcagtggcatgatctcggctcactgcaagcttcacctcccgggttcacgccattctcctgcctcagcctcccaagtagctgggactacaggtgcccgccaccacgctcagataattttttgtatttttaacacggggtttcaccgtgttagccaggatggtgtcgatctcctgacctcatgatctgcccaccttggcctcccaaagtgctgggattacaggcgtgagccactgcacccaggcccttcctctattattgatatcttgcattactgtggtgcatttgttacgttgctaaatgaaccacttgttaattgtgaaatgagccaatatcaatacattattgttaatcaaagttcagagtttatataagagttcactctgtatgttgtatattctatggattttgcaaacatacaataacatgcgtccaccattgtagtatcacacagaatagttgcattgccctaagaaaaaaaaattcctgtgttccaccaatttatccttcccttcctccccataatgctctggtgaccattgatctatgtactgtctccatagttttacctttcctaaaatgtcacataatcagaatcatacagtacattcatcttttatattggtttctttcacttagcaatatacagtgaaggtttcctcacattttttcatggcttgatagctcatttctttttaatactgaataattttccattgtatgaatgtaccacagtttatctattattgatgtaccagagtttatttattctattgaaggatgtctaggttggttccaggttttgacaatttctgtagccctttttcttctcctaactccatcaatttcatgctgcccatccttcatttactgccccatccaatataattgcctcatttctctcacactgtccaaatatccttttacttcccttaatctctgcttcaggaggaagattcactgagtgccatcttcaaactgcgctttgtacctttacagagctgtttccatctgaaatgccttcctcctctaaaatcacgaaatgtgtatttgtgcgtgtgtttgtgtgggtgatactcaatatatatttataaagcttacctacaatttacatattgtttctgaaagaccaaattttcaatgaattttcttgacaagtgtatcttcttttttgtcatagtcaaagtcaagggatgtagcccgttttctgctgtgaagcattccgtgatgttgccgactagccaggcatctgaacatcaaattattagcacgttttctagtctctgttgctctcagtaataacaccagctcttaacttaatctgcactaggacataaatttattatgttagaatttgcccaacactgtcctaactgctatttgttttaaacatgcccaaaaggcatgagattggaaagttgattattattacctcattttttttttttttttggatgagaaaacaagaactcaagagattgtgactttcttacaagggagggaagataagtattaaactagatcctgtaaactcatgcttacagttttgtttttttcttaaacaaacctgacctctgctgcttcttaaagaaccaaacctgtgtttgtatgtatttatcatacctacattttgttaaccttttttgcatggttaagtcagaatctttcctgaactcaaaattggccaaaaaatagttttgtttcatgcaacctctatgtcaaagtatgaactcaaatctgagctactacaattattacttcatatacaccaacacacacacacaaggaaatgatgagcatactaaatcaaatacaattttatttcctaatgaaatgagctaagcataaatatgacaaagtgtgcagtggagaataattatcagccttcctttatagacaacatcaggctcggcaaagtcaatttgaatataaatgcaaaatatgttgagaacacatttagagaaaagcaataatagttactaaaatagactattaaattatcttttaataactttataatagcaaatgtaatactgtgaaaaagcccaagatctctaataaaatcaggcgagtctgatttgcaaaaataaataagatttaaatcaggttaaattttataagcagtgctataaagtgaatttgttctgctatagtatctgctagataggaggaatagtttgaacaactaagttctttcaaattatcaagtgtaagaaatatgataagcatgaaaatacacttaaagcatgtatgtatagatgatactggcagtagtagttgtattactgtatgttgcctatatttagatctgatttaggatgttcatgtggtataaattttaaaatatggttgatattgaaaaaggagcatatttgtatgagtgtgtgtggttgtgtgtgtgtgttttactatgcaggattttaatatttataatatttggcattgactagcaatatggcttttttttttttttttgagatggagtatcactctgtcgcccaggttggagtgcagtgctacgaactcggctcactgcaatctccgcctcctgggttcaagcaattctcctgtctcagcctccccagtatctgggactacaggcacccgccaccatgcccggctaatttttgtatctttagtagagacgggatttcaccatattggtcaggctggtctcaaactcctgacctcaggtgatctgcccgccttggcctcccaaagtgctgggatcacaggctgagccaccgcaccctgccaagatatcctttatgtgccagcagctaatatttggagctgatactctaaatacaatgtttgaaaagaaaaaacaagaaaagaaaaacaaatgtgctcatttaagattagatttgtgctaagaacatatggatatattgtgagtataagtgattatgggcatagatacaattgtctcactttggaatatactgttctagaaaggtgactgtagcagattgcaagaatgactccaatttgtcactccctcctagtttcatcttttaccacatactttgcagcatcctccatgctgtaaagtagaggatgcaaagtggtgagggttggagtggggagggttggagtggtgagggatggagtggcgaggattggagtggcgagggctggagtggcgagggatggagtggcgtgggttggagtggcgagggctggagtggcgagggatggagtggcgtgggttggagtggggagggttggagtggggagagctggagtggtgagggttggagtggtgagggatggagtggtgagggttggagtattgaggcttggagtagtgagagttggagtggtgagggttgtaatttcttgattccgggcttagccaactgacttcctctggccagtgaaatattggcagatataacacaagtagaagttttaaaaaggcttgtaagcccaggcttgcttgcacttgccctgtgctcttgctatgataatatatatgcttcgctttgcttcctggtcccagaaaaagatgaaagtcatacagaacagagccaaatggtcccagttgccccagatgaggccagtctacactagccaacagcctccaacccaaagatgtatgagtgaccccagctaagatcagccaaactttgccctcataactagaaagctatcataataaatgattgttgtttcaagcagtgagttttggagatggcttacacagcaatagccaactcacacagtgatgatatgatctcccagatcaaaatgttattctgtagacatgaagagaaaatgaagcagctgactctgggaaatgaaaggaaaaacaaagctgttctgagaatgttttttggggattctgtccctcatgggtttgcagtaaaaatgatcatgctacaaatactgagagtagttttgtcccacagtttataagttacactgcacactcatattaattttttcatgtgaaggtcaaaaaatacttagtagatggggcacatatttccatatactttttcataagtagatgcactcccatagagctaaatgcagggcttgtcaactctagtgcctttccccatttctgacttgccctgctacattttcatacaatagagtgtcactaaggagagcagagcagataacccaagtgacaatgacaaatcacacagtgctatcacacaatagtaggaaaaaaaatgttgcatttctgaagactggacaaagtgaactcgtccaagttcatagcacaagcaaaactcactttttaagagtcacttggaaatcattttccaacataaacactgagcatcatcctgaatgctatcctaaaccaggttccccaggcactgtgtgctttatgcccctctaaatgcaatttatggttgcaaaaaaatctggagtcaagtagttaacaaggtctctgagtgttaatataatagcccttgctaggccaggtgcggtggctcacacctgtaatcccaaaactttgggaggctgaggcaggcagatcacctgaggtcaggagttccagaccagcctgccaacatggagaaaccccatctgtactaaaactacaaaattagctggtcgtggtggcaggtgcctgtaatcccagctactcaggaggctgaggcaggagaatcgcttgaacctgggaggcggaggttgcagtgagccaagattgtgccagcctgggcaacaagagcaaaactccatcaaaaaaaaaaaaaaaaagaaagcccttgctatagcttttctgttgttgtagaaagtctcatcaatattctatcagtaacttactgccaagtcatttttacctatagcagcaagtcagtccaaatgactccaggaagtttcccttgtgtgaaagtcaatgaatctatctccacttcttggagacaggaaccagtcagaataataaaaaataaaagcaaaaataaaatcttccaaaaaagttgtaggcaaaataaaacaataaggatcccaaaaacaaatggaatcccaaataaatacataaatatttcttaagaaataattaattttaaacattaaaaaaggaaataaggccgggtgtggtggctcactcctgtaatcccagcactttgggaggctgaggtgggcagatcatgaggtcaggagttcgagacaagcctgaccaacatggtgaaaccctgtctctaccaaaaatacaaaaattagccaggcatggtggtaggcacctgtaatcccagctactcaggaggctgaggcaggagaatcgcttgaacctgggaggtgtgcactccaacctaggcaacagagtgagactccgtcaaaaaaaaaaaacgaaaaaagaaaagagaaagaaaaaaaaagaaaaacaacaaaacctaaaaaaattaaaaggagggaattaaatgtatatgtctcttcttttgccaggtaatccattcatcaaatatgtatgaattttgaggtagataattttgtgtaattttctcagtgttttctttttttgaaaacagaatcagctgtgtgctgaatatttttgtgtaatacatattttacctttgagtatgggctatttgattattattcaagtataattgaaacaacctcattgtctgtggtaaataccaaggttcttggcctcacagccaaggagatcgaggtcacggacacacacaggcagagtgagttttggagcaggagtttagtaagcaaaaggaaagaacagctcttcattacagagagggatctggagcggggttgctgggtggtagaaaaaatatcaggggtttcataaatgggctagggagagggggctgttgagaaggggatgtcttaagaataattccctcaataaacggcttcttctccctcaaacccaaagaataggaagctatccaggagagaactggcaattagtccacccacatgccgaagacaaagcgcatccaatacttcctagcgtgggtagatattttcactaattgggtagaagcatttccatgccgtacagaaagcgcctctgaagtaataaaagtgctagttaatgaaatatctccccgctttggcctacctaagtatctccgaagcgacaacggcccctcatttaaagcagctgtcatccaggaggtctcaaaggcactaggcatacagtgccatctccattgtgcttggaggccccggtcctcaggaaaggcagagaaaacaaacattatcaaaagacacctcagaaaactgtcccaggaaactcaacttccttgagtcattcttcttcccatagctttactacgagtaagaaataccccttcaaagttaggcctgagccctctcgatatactgtagggatggcctttccttacaaatgacttcctattagatcaggaaacctccgaattagttaagcacgtaacctccctggctcatttccaacaggaattaacacaactagcagaggcccaacacaaggaaacaggaccacctctatttaacccaggagatttggtactggtgaagtctcttccttctctctcctgtctttaaacccgagttgggaggggccttaaaccgttcttctctccaccctcttgacaataaaagttacctgaatctactcctggatacatcacacttgagttaaagcttggaaaactgagggaaaagtccctgacagcccagaaaaacgccctgaatatcactgtgaacaaatagaggatctcaagctgagaacaaccaaagataagtaaatgaatgagggctactcattccacatagccccctctttgccttaccaaatcctctcagttatttccacctttccccttgaacttcgccgccagacattacaactcttctttgatgcatacttgcagggagattttgactatccttgggagtacgtttgtaagttcatagacctacaaggggaaattgtatattctggcaaatggtaaataaattttggatggaaatagcttactacattataattgcaggaattgctatacttactctgctgtttgcagtgggactatataccatgatacacagtggaattctggacacagaattgtacttgctgtaatcttctgcctaactatcacctttataacaggtctaataattacagaaaaaaaagacaaatatgaagttcttgctactgaaacttttcttcctcctcctgatagagcaggtcaatcccctaaaccctatagcccaacaaatccaacacctcgccttggcagtcaacctaacttcatgttatatttgtacttcagactcgctgtcagcggaagtattaccactatcattggaggatttagccaaagttaacactccagttaccctcgctgctcagtccaatgcaacttatcctgataagcaagtcaagaatatatttctcccaatcatctcacaagttataaaggatggccacccagacctgaattttacagaaaccccacctcctataaaagtctttcacaatgtagattcaaggctcacatttcctatttatttcatgtcccaaaggaaaaaaggaactttcctgagaaccttgtccaactgctcatatgaagtctttcttagctggacagctcaggaaaggtcatgtgactcctcagaaaagagactcaaatagtaccttaaagtaagaaagcagcaccagttccttctccttaaatatccaaattcaaggcaacctcaatttactagtaacaccaacacttctcacatttctacgggttggtactcagtgttgatagataactcgcctttacccctaacccaaactttagcctgggtagtgcagagaatgtttttaaatttccaccccaatcatatattcacccccagcatttgagcagaatttgcctcaatatgggaggacctcagtgggaactacttaagtacacaagacccccccatgtagagctgaacttttggggatacaaagtgtctctagatctcaaacgagagctatgcttcatatgtggaaatttggggtatatgagcccaccaagtcactggaggagaacctgtggtgttgcagcaatactttcaaaactatcctatgccaatacttccatacaattcccattccttatgaaacacccatattgtagtaaaaaaggcagctcacgtaattctactcaggcagctcatgtaattctactccctttagcagctgttgtaactggactcctaggaaccactgttcagtccgtctcccgaaggtaaatgggattacatttatcctttcagcaaacccaagctctagctgaaattacggctggcaatcaggcatggtggctcacgcctgtaatcccagcactttgggaggccgaggcaggcggataacgaggtcagaagttcaagaccagcctggccaatatggtgaaaccccatttctaccaaaaaaatacaaaaagtggccgggcatggtggcacacacctgtaatcccagctactcggaaggctgaggcaggagaatcgcttgaacctgggaggcagaggttgcagtgagctgagatcacaccactgcactccagcctgggtgacacagtaagacttcatcttgaaaaaaaaaaaaaaggaaaagaaattacagctgccattcaagaacagcaatggcaaataaactcacttgcaggtatcaccctgcaaaaccgtatgggacagaacctcctaatggcaagtcagagaggaatatgtgttttccttaaggaagagtgttgctcctatattaatgcttctggtaaagtacagcaacatctagtagaggcaaccaatattatcacccacgtgccacagcacaacccatctacatggctcacaggcatcaaacaaactctgatgtcatggttgtggtctatagtgcccgcactaataatggtaatcttaattaatactcatatttagaccctatatgctgaacctccttgtaaagttcatctcttcttgcctagaaaccatctagtttcaaatggtgctgcaaatggagctgaaaatgaaactgtccttctaaaatgaaaccgcccttctaccggggacccttaaattgatccctggaggagccctaattgctggtccccacacaatacccctctccagcaggaagtggccagaagaagtcgtcacccaattccccctaacagcagttagggatcccattgcagaggggagaaatatgttataggagacaaaaagaaattatttaggtagacagggtaaagcgagtccccggcaggaaactttccttttaacaaaaagcagctcaaacagagctccctttctaacctcatgcagttcaaggatgccacttctcttctaacaacaagcagcctgaaagagcagacaacaaaacacagataagacagctggggcacagaaggaggggggaaggtctcctggataatcaccaaacttcacatttataccatgggtcccagtaaaacagtgggctgtaataagcacattcctttccctttaggtgcactaagatagggaagctaaaagcagatttggaggtatgcctgcagctgcaggaagacgtatgggaacagacagaaactctccctcccacgtaagcaagacaaagagacacagactaaaagttggcctatgtggtccgggaatggagtgggaactgataaaacaaacaaacaaacaaacaaaaactctgctctatacagatagcatacctggctcaactgaacctttgggcacccaggaggataagacacccccttctcaacagcccccttctcactagaccatttataaaaaccctggcatttttactgccacccagcaacccactcaggacccctctctgtaacggaaagctgttctttccttttgcctgttaaactcctgctccgaactcactgtgtctgtgtgtgtgtccatgacctctgtctccttcactgtgagaccaaaaaccttggtagtatttaccccagacgacgaagctgctttataattatgttcttgtaaagcatttctgaaaatgttattgctccaaattgtaaaattgcaagtttaatattaaaagaaaataaaacaaaaattacgttttttctaatgccttcaactcctaaataacctgaatcgaagttaccagggaggtttttagtattattaaatactagatactgccaattaaaatgaatcctatattgctatataaaatgaacttctgctgttttttaatattctttggacaataatccacccatggcacatttcaaaaagtaactctgacataaaaataggaaagttctctaccagaacataaagttacatctctctttgataacagactacttgtagatttagttttgttttgttttttgtttcttttatacttcaagttctggggtacatgtgcacaatgtgcaggtttgttacataggtatacatgtgccatgttggtttgctgcatccatcaactcgtcatttacattatgtatttctcccaatgctatccctcccctagtcccccacccctgacaggccccggtgtgtgatgttcccctccctgtgtccaggcgttctcattgttaaactcccacttatgagtgagaacatgcttggttttctgtccttgtgatagtttgctgagaatgatggtttccagcttcatccatgtccctgcaaaggacatgaactcatccttttttatggctgcatagtattccatggtgtgtatgtgccacattttctttatccagtctattattgatggatatttgggttggttccaagtctttgctattgtgaatagtgccacagtaaacatacgtgtgcatgtgtctttatagtagcatgatttataaatcctttgggtatatacccagtaatgggattgctggaagaaagaagggggatcaatagggaaaagttcaatcctaatacatgtaatcctttagtcaattacatgtatgtggctaaggacaacttggttcttttgagtggcagagcaatattatatcacctaacaattgaatgacacacaatggataaaacatgtgtgatatatatacatacatctaaaatcacttttcctcccagaaagggaaaaagttacaagtcacataaatacaaaaatgcatttatttcagagacttttaaaacatttatcctaaagacaaaaaaaaaaaaaaaccacacaaatacctgaaacaatcatatagatctcaacccctcccagacaatgacaacacctaaaattgtttcatgattgaagttacctgtcattggcggggcgcggtggctcacgcctgtaatcccagcactttgggagaccacggcaggcggatcacgaagtcaggagatcaaggccatcctggctaacacggtgaaaccccatctctactaaaaaaatacaaaaaaattagctgggcgtggtggcgggcacctgtagtcccagctactctggaggctgaggcaggagaatggcgtgaaccccggaggcggagcttgcagtgagccgagatcgcaccgctgcactccagcctgggcgacagagcgagactgtgtctcaaataaataaataaataaataaataaataaataaataaaaataagttacctgtcatctgaatgttatatatctatgttatacatttactatattttgtattcgtgtttaatcatgaacacattctactaaatatgagaaagattctgtatgattctggatcctgccctaagaacagtgtatcctcaaataacagtcctgcttgtgcacttatcttctcactctgtagccatttctaataaagccactaactttgctctttagattagaatttacccacatgattcttgagatcagtgctacctatagttcacctaggaatgttccatccttagtcatccaggaaagtccataaaaactgtcaattaacagtttagtcacaatgtgataccaaaaaatcccatcattagaaaccaatttgcaaggtgggctctgattttcctactcaaaaatgacaggcaaaaaaaaaaaatttactttaattattttcggactaggatctgaggtgagaaatcacctctgtacttttgcccaggatcatctggagatagaaaccacaaggaaagcagaaacttcccccaccatccctccaccacaagtcctatggtctgttttaaccagaccagccagccctgttttactctatctgagtaaagttgtgtttaaagaaaataattcattggttaaaaaaataaataaaatgactaacttagttcaagtcttaatattaaatattaagcttagttcagttctgaacattaaaatattaggcttcccccaccatccctccaccacaagtcctatggtctgttttaaccaaaccagccagccctgttttactctatctgagtaaagttgtgtttaaaaaaaataattcattggttaaaaaaataaataaaatgactaacttagttcaagtcttaatattaaatattaaccttagttcaattcttaatattaaaatattaggcttagaatggttataaatatataaaccttttatcactggagaatgaaaattaaagaagtaacacaatttttcctgattaaatttataaaaattatcttgtttgaatgtctaatcttctacttccgtttctaagtataaattttacatagacacctatagaattcaatcaattaaaatttaaattaaaaaatataggctactttatggttttgtttggtgatttaattacttcagtcagtatttattaacttggcttttatttcaccatatcaatatttaccagctgagttttaacttcggttatataagtatctataatacatttaaaatattcgctagaatagagtggtatagtggacactgaagactcagaagaggacgagggtgatgagtaaggaatgaaaaaatacctattgggtacaatgtgcaccatttgggtgtcagatacgctcaaagctcagactttatcactgtataattctttcaggtaaccaaaaaccacttgtacccctaaaactattaaaatgtgttttaaagtatatcataaatacaaaaaaaataataaaataaaatattctctaggtataaaatgttcaataaagtgttagaattagggtaaaacagacaaaaatggaaatgggcaaattgtaaagatcagacagactcatcagagaacagtaggtggctaggacatactgaagaaagaggcgtaacagtaaaattttgaaagtcaaaatccaacatagattggcaagtcaattctcacatttttgatgaaaagagaaataattaccatggcagtacaatagtaaaacaatgtcgatgagtgcttagtgggatcttgccaaagttaaagtgtagctccgtatttttatttttctgttttcaactttatagtggctttatatgaaacttaaaacgcagagtccttgaccaatttctgcatggccctacttttctgacatcattgcactctttttttttcttttttttcttttttcttttttttggcacatatatagtttgctttcatactagaatgtaagttccctgaggcagggactcacgcactcctggcttgttcgctccctctgtccccagcctgacacctaagtgtctttaaaaatgttcgttgactatcaacataattgactggctattggaatcatgcagcactggaaagccaagttataggatgattgatttatcgagcatttactcagagaatggaggctggacagtctgaggtatatttttttagttcactctttttagcaaataatttttgaacttatgctttttacttacccatttatttcttcatttacaaaacataggatgagaacttatcatgtgctaggaactattttaggtgctgagagtaaatattttaatcacaacagataagaactctcttctcatagacttggtatttatttttgttttctgtccttttctttttcctctttattttattttttggcatgtagagaaagaatctatctttgcagagtggaaagtgccaggaagaaactaaaactaattaatattatagagactgacttacccttctcactccaatgctgagtggcatctcaaggaagtaacatttgaatcgaatttcaagacaagaaggaaccagctaagaaattatttgtcaggaaaatgttccaagtggtaacacagctggtgacaaggccctaaggcaacagcaaatgtggaataatcaaggaagagaggaatactagttgaaatgtagaatgggcactggggagaaagttgtgagatgagctggggaggaaagagtgatttatatgccctggtcagacatttcaagttcattctacatgaaatgaaacaccactggagcattttaagtggaagaatgatgtaatacagattgcattttaaaagataattttgttgctaggtaaggagttgatatggtttggctatgtccccaaccaaatctcatcttgaattgtagctcccatgattcccatatgttatgggagggacctggtaggagatcattgaattatgggggcagttcctccatactgtctcatgaataagactcagtgagtaagtctcatgagatctgaaggttttataagggaaacccctttcactatgctctcattccctcttgcccaccaccacatcagaagtcccaatgctctcccttcgtcttccgccatgattgtgaggcctcccaagccatgtggagctgtgaatcaattaaagctgtttcttttataaattacccagtctcagggatgtctgcagcatgagaccagactaatacaagagtagactgaggggaggcaagagtagaagcaggtagaaaatactaaggcaccatgttattcgttaggactaagatggaacgattagtgacctacctgcacaaaacctacaatctctatgaaaaacacaacactctgctcattctagaagtctgtcactttaaaaactaaaagtggcctctagattttgagaaaattcacctgtggccatgcttaaggccataacatcttctcaaaatttagctcttatttcaggaaataaagtaatacattcctagaattttcatgtaacaggtaaaaaaaaaaatcctgctttaaatttcactccaatactatagttgtttttttcccaaatttctcaattcttacatatatattggtaatatttatttccttttcgctagtctttgcacttaaacaaaatttattctgaattgttatatttaaaaatatttactgggctcacttttgcattaaaaaacaattattactacacacaataaataatgcctgtggacttttatatactataaaagacagaattagttaaaattgctacaaaacaaagtcctgaatacttttaattatgtaaaactcagattcttacaattaagaacactaggttcccacagaaaatgtaaggcaatggaatttaaacatacgaagagagagcaagagagggattagccccattggacattaagaaaagaaaaaaaaagctctattggactttaagaaaaaataaaaacaaaggatcaactaggtcttccatggtggctgggggaaaacctatttttttaaggaaatgtctgaaagcgtatgcctaatgccaacacttttcagagatatcaatgaaaagaatagagaagatttttagtttcatgatatcaatgtatgagaaaattacaagagtaaaagggaaaatcatcttctctctcttagaagagttgcacaatgtataaatggctaaaacaatgacctaggaaagagttttcaagagaggaactattgaacttttgaagttactttctgattattatatctttatgaccaaaaatgttgtgtttagagagctatactgtcaaatacataatccagtactaaaagaatggctgtattcccagagtagcaaagaatcataatatcaaaggagagtaaagataattctcttcaagtaataaagtgaatttagataagcaaccaattagaaacaattttttaaatttatctttttgacttcaggttaacctccctgtatatttattttacctgagaaaaaaaattaacattcattgccacataaaagcacaactaaaatacagttggaaacagtgtgcttttgacaaaagaactatatcactgagttctaaagacaacatttttctcaagtatgtcaaacacatgtaattatattttcatgttttcacattcatagtcaaattatttagataacttatttcaataaaatatcttcttttggtaatattgtgctctgtaaatggagaggaaaataacctatatctactccaatttttttcccttacagaattattttccacataatgccacgttctaccttctaagcaccaaataaaggaaaattgatatgtggctttcagctgcctgtatcaaatataaatgtaggcaaatgaaagagatatgtttaagaaatgtgtagatcatttatatgttatgaaacaactttgaaatatttttgatgttttattttgcggcaataattgtcacaaaataggaccaaatgtgtctgtttaagaaaaaaaaaaaatcaaggaccaatgtagaagggaaaccgtgctcaggcatagaacgacaatatccaggagactcaggttattgaaggagaaaacgttaaagagaaatttgggcttcagagactgtaaatgccacatgctattaaactataaagattgctttctgaaactgtttattcctgaaagtgagtggggaaatcttatggctaaaagaaacagaatagaatgagtttccagtgtgtcttgggattcagtgtttacttttcaccttatttgctcagagtagaagatgaaaatagggagagaaaatacaagtttggctcagagatccaaaactgaaaagaggaggtggcaagtttagctagaaaggtcaaagtcctgccggaagtttgctttcatgttcactggagccgagttggttctttttacatgagaaatcccttcaagccacaaaattgtgagatactggaaggaaagtgtatttattagtccattctcatgctgctatgaagaaatacccaagactgggtaatttttaaaggaaagagaaatcaaattcatatgtttcatgatcaaactcataatcacagtgcaccatcaatcacttaataataaaaatgtagattgtctttccttaattgagtagaaggcaattagaacttagcacaaaccactatccctcccacccattccccaaaacacagaatggtgaaaaagcatgaaattatttctccctgatgaagacaactgccttctccattctgaaaataatttcaagtacctcaactgagacacaatctatttctagttctcatgtatatttgtgtgagatggtacaacctcttgaatgtcatgtattttgttctgcatgtggtcattcttcaagcttgactattagatattttgctcttttatttctctcctgtccttgatgagatcttttttgccctaatgattctaaaattcacatctctgccctacctttttttgttgctgttcatttagatttattttgattcaaagttctactttatattgcttcccattttacaaaaacactatacgtgaataaagaaaatcattacttctggctctaaaccatgacctatctctggcttctcccatactacaaatggtagcacaattaaccctttaaccaatttccaaagatgacggtagaaaaagaagctaattcttcatttccaattttcaagtttgtaatgatatatctcacagcttcagtctagatcctcaatcttagtgcatcacaaaagcagtaacacttgctttcttgttttaaaatgaaatcatcatacattgaccacactgatcaccatttcccctttaggccctagttgttataacttgaactaaatgttaactgtaagctacaatactctcacctaccagctttgtcagctctttcccaacttttctaatttgtgttaatttggcaagctgttttcacaatttgaattttactattatataacctgcctataattttgtcttcattccttgaaaatgctattttaagtctcacattcttcgccatgtattctgtgcaaaaagttctacttgattctaggtcattgcagcactctggcatctcacatttatttaaagagagaaagctagctaaatatgtgactttggctgggtgtggtggctcaacctgtactcccaaccctttgggaggccaaggcaggcggatcacctgaggtcaggagttccagaccagcctggccaacatggtgaaaccccgtctctactaaaaatacaatattagctgggtgtggcggcatgtgcctgtagtcccaggtactcgggagctgaggcaggagaagtatttgaacccggagagggggggggggtggaggttgcacctccatgtttttcatttaagttatttagctatattcttaaagaatattctttgttctttaagaatattctttgacttttctaaatatttcatacgatagttttatgggtgagagttttaaaataaaatctatcacaataaaataaatttatttttattttaaactctgaacaattttccaaatacttgaggcagaaagttttctctctccacattgactctccatacaataagtacatgtaatttattctagtgaaaagattcctactcaacattggagatcaatatgcctttactgaaaccattcaagcattcaaaaaatattcattgtccaacacctgtacccaactaggatcattaactcagactggttaaggaaagacaaataaaacaagtcatgtattcccctgccttcatagagttcatgttatgaaggggcagacagaaagcagatagtaaaaacataaataatgtttataattggctgaaatgcataacaccctgactcatatgttaaaaccctaatcctcagtaccttagtgtgtgctgtatttggagacaagaccttaacagaggggattaagttaaaatgaagccattatggtaggtcctaatcccatctgactattgccctttccaagaaaaggaaattggacatgtgaagaggcattaagggtgcccatgcccagagggccaaccatgaggagagacacaacatggtggccatccacaagtcaaggagagaagcttcaggagaaaccaaccctgctggcactttgatcttggacttccagcctgcagagctgtaaggaagtaaatatctgttgtttaagccatccaatatgtgacattttgttatagtcgccctagcaaataaatatagcaccaaacagtgatacatcctacaaaaaacagaaaagaagggatggatgtgatctgactttagaggttgtagaagtctctttgaggagctgacatttgagttgagacatgaattttaaaaagaatttttgaggaagctgacatttgagctgctaagtgaattacgagatcatttgggtgaagataaactataaagtgcaaagtccctacggcgagacaagcttggcttgctctgacagcgaaaaggccagggtgagtggagttagtgagcatgggggaaattgtggtctaagatgaggaaaaatcaaaaacagtccagctgtcactgggtcttgtaggcagggagaggagtttatgttgtcactctgagatgagtcattgaaagatattaagcaatccttttaagtctggtttaaatttaagtgaaaaaattaaaaaagcacgcagagacggcttccttttctaaatatcccccaggtatgattttgctctcatcctgctcaaaacggagtagccatctttaaaaaacaaacaaacaaacaaaaaaaacatttgaatttctaatattgtgcacaaaactttcaaataaaaacagctttactgtgctttactatattttatagagaggaaactcatttctaaaccatcttttaagaattagcagtatgcccagagatagagaaatactacatcttttattttgtgctctatttaaatcaaattaattttatattccctagtcattataaagcccataattatttagttaattggactataggacaaacataatggatacttttttttcttttttttttttttttacagagtcttgctctgtcacctaggctggagtacagtggtgtgatcttggctcactgcaagctccacctcctgggttcaaggattctcccacctcagcctcccgagtagctgggattacagacacctgccatcatgcccagctaaattttgtagttttgtagagatggggtttcatcatgttggccaggctggtcttgaactccagacctcaagtgatccatctacctcccaaagtgctgggattacagttttgagccactgcacctggccaccatggatactttcagttgataatttgtgagtttttgcttacagcattttgttgattagtcttaaaatatcgtgtagaaagcattgatacaagaatctatcacagagtgttagtaatttaaaaagttattgttagtaaaatataacaaatgaaatatatttagaagtaaaatactacactactaatatagagattcctcaggatgagagttgagtgtctgcagatactacattttagatatctccaagaaagagctcaggttttatgattttttttttctgttataagttgagtgtattacatagagatgctcaattttaaccacagagggcctctttatttacttggcggattattaaatattctgcttttttcccactctactctgtaagagtaacatgattgttatcaagcggaagaggcttgctgcccaatgttctagaagccaatactatgacaccaggttcttaaaaaaaaaaaagctttgtattgaaagtcaactcccaacgtgagagagtgttaagctcaaatctatctctctgtcttggcttcaaacagtatttgtattagaaaagtttcagaggccaggcacggtggctcgctcttgtaatcccagcactttgggaagccaaggtgggctgatcagctgaggtcaggagttcacgaccagtctggccaatatcgtgaaacctcatctctactaaaaatacaaaaattagccgggtgttgtggcacgcgcctgtagtcccagctactcaggaggctgaggcaggagaattgcttgaactcgggaggcggaggttgcagtgagccaagatcgtgccactgcactccagcctggacagcagaacgagactctgtctcaagaaaaaaaaaagaaaaagaaaaaaaaaagaaaaggaaaggaaaggagaaagtaaagaagaagggaagggaagggaggggaggagaaggggaagggaggggaaggggaaaggaggggaagggaggggaagggaagttgaatccacatgttgaaaaaggtgcctggtccaggcacgtggctcacacctgtaatcccagcactttgggaggttaaagcgggcagatcacctgaggtcaggagctggagaccagcctgaccaacatgacgaaaccctgtctccactaaaaatacaaaaattaacgaggcataattgcgcatgcctgtaatctcagctactcggaaggctaaggcaggagaatcgattgaacctgggaggcggaagttgcagtgagctgaaattgtgccattgcactccagcctagggcgacaagagtgaaactctgtctcaaaaaagaaaagaaaaaggtgtgtggtgcgaggtaattggattatggggatggacttctcctttgctgttctcatgatagtgagtgagttcttacgagatctggttgtttaaaagtgtgtggtacctcccctttctcactctctctctctctgtggccacgtaagacatgcctgcttccccttccccttctgccatgattgtaagtttcctgaggcctctgcagccatgctgtctgtacagcctgcagacctgggagtcaattaaacctcttttatttataaattagccagtctcaggtagttctttacagcaatgggagaacagactaatatacttaattataaatatgatgtcactagtttatgtatttactatactacactttttatcattattttatagtaaacttcacttctatttattacaaaaagaagttacatgtaaaataacatcagacaggtccttcagaagatatgcaagaaacaggtattgttatcttgagatggcagctcgaggtttgttactgtccttgaacagcttccagtggacaagatgtggaggtggcagacagtgacattgatcattctgaccctgtgtaggctaatgtatgtgtatgtatcttaatttgtaaccaaaacaagtgtaaacattttttaaaaaatcaaaaaatagacaaatgcttgtagaataaggacataaagaaggaaaatctctttgtacagctgtacaacatgtttgtgtttttagctaaatgttaatgcaaaagcatcaaaaaagttaaaaaatataaaagtttatgaagtaaaaagctttcagtgggtaaagttaacatattattgtagaaaaaaatctgtattttataaatttgatgtggcctaagtgtatagtgtttataagtctacagtcgtgtacagtaatgtcctacgacttcatgttcaatcacccctcactcattgactcacctagaaaaacttctggtcctgcaagctccattcttggtaaatgccctatacaggtgtaccattttttatcttccatatcatttttacagtagcttttctatgtttaaggatattttgatgcacaaatacttatcattgtattacaattgccttcagttgttggtacagtaacatgctgtacagctttgtagcccaggagcaataggctatgccttatagcctaggtctgcaatagggtatacaatctaagtttgtgtaaaaacactctaggatattcacatagtgatgagattgcctgaggacacatttctcaaaacactctgtatgtaaattctacaaaaactcatgtgttacatttctatgcaagtctcggccaggcgcggtggctcacgcctgtaatcccagcactttgggaagccgacgcgggcggatcacgaggtcaggagatggagaccatcctggctaacacagtgaaaccccgtctctgctaaaaatacaaaaaattagccaggcgtggtggcgggcgcctgtagtcccagctactcgggaggctgaggcaggagaatggcgtgaacccaggaagtggagcttgcagtgagccgagatggagccactgcactccagcctgggcgacagagcaaaactccatctcaaaaaaaaaaaaaaaaaaaaaaaaaaaaaaagaaggcaagtctccagatgggaagagatggcctccccatgcaaagttaactcacatttgtagcacctttattttggctctgtttacatcacaccttccctaacagggtcaacttgctcagatctctaaaaccaagtacttatcacctgaaaactcctttgagattcttttgtaatatgcatattccaaagtcaatgtcaacatattaagatgttacttattttaatctgtaaacaatcattaacatatagtatatttgtagacaaatatactttgattttctaagcatttatctctcaagcaacaaaacatcccaaaaatgatttgtaattttatgttcaaatttttttcattgtcaaagcacgcagaaacacacattttctgaattagtccacattttttatcttccaattattatctagaacttttttcagtattgttcttataaaatagtaacatcttcttgctacagtcagaaaatgtaaatgtttaggccaaaataattggagaaaatataatgactcaaaacactattcagagaaagggcatgatatgggagggtttttgtggacagagagtgcaagaacttttcgataggggagatctaaacttacattttcagaaaagaaaaggaaaacagataaatatcaagaacatattttaattaactgctgaaaatcctaattaaataactatgcacttgttaatttcataagatgcattatacaaccaaaagatattttgccagtgatgataaaatgcctaatcacctgggtaagtcttagattccccagagaagatgcagaatgtatcttttagtatcaggtcagcgagtcaaatttctctagaggttaatatcattagaaatttcagtgcctgaaacatgtcatatttgtgttttattcacaaagatgacagattgctcaggtctctaccaaatctagtatttttctgtcctagtttcaataataggttgctgcttcagatcaatatagcaagcaaattaaatcataaagctcaaaaagagaaaggaattctgttgctatccatctcatcacaaaatatcctcaccattacttcaaaattgaattcatggcttcatgaaatatcacttacattcaatcataaattgaaatactggcatatatatatatacacacacacatacacacatgcatatttattagttgcttttgtgtacattttctctttaactctcacttcattcccataacataggcatgtaataataaattattaatttttaaagtttaggtctgtgttactgattgtgttctatatgacagccattatgtaggtgttgaaatgcaacaacaagtttaaaaaaaaaaaaacagcaaatatccttacactgagagagactagaatggaacagggactgaatagtaagtgttaaatgaaaaatcacacaaataaatgtaaaattgcaattctgataagtgttagaaggcaaatacaagattcctaacaagagaatttgaactactcacatatttaaatggaaagtgtcctgtgattattgaattgagatctaaaagatgaaggagtgaaaaggagtgttcctttcttagggctgctgtaacaaagaaccacaagctgagtgacttaaagaaacaaacatttattctctcacagttctataggatagaagtcttgtgatggagcaagtaggggcatttgatatggaaagggttgatttagggagaccaattagtgaaccagaattgtaaaggattgagatgtagttagacataaaatgacaggttctggaaatggattagtaaaaggtatgaggaaaatagagttatcaagaatgattcagtgttccttggcttgtggcagccaagatgttccaatcttggccttcatcatgacatggcattctccccttgtatctccacattatcttttgtgcatgcatgcctctgtgtccaaattttcccttatcctaacaacagtcatattgaattcaggcccatcctaatgacctcattgcaacttgattacatctgtgaagatcttattctgaaataagctcacattcacagatatgggggttagaattaaacatatttttgagggacacaattcatcccataacagagagggtagttagcatttcaggtcaagggcccatggctggagagaacctgatgcatttgggtaactgatgtggccagatcaaagagaagaatgacatgaaatggaattgtacatgaaggcaaggagatggaggccaagataaaaccaacagaaagcatttgaaaagtttgtaagggtagatggcaactttggcttcagtgcttagaatggatcatatgaatatgtgttggagcaagtaggtgcatttgatatggaaagggttgatttggggaggcctgttaggaaactattagagtcatccaggtgaaccagaagtggatacgatcgagatgtagttagacataaaatgacaggttctggagatggattagcaaaaggtatgaggaaaacagggttatgaagaatgattcccttgtttccaagttgcaaaattaggaagaagacagtgtcatttggggaggttaaaaattaccatttgatatataagattagggagattgtgaattcaagtttaggtgtcaagtgtgaggttgcgtagagtagaccaagaggagatattttgtagggagttaactaaatatgtgaagcgtccaaagaaatcaaggttaattttcattaagtttaattgtggggtcatcggtgtcattcaaggtagttgaaattctgtctcctataagcttatatttataatatgttatttaagatttgtaaaaatgtaaaaagaaccaatatgaagactttattaattaattcattttctaattgaggtaaaattcacataatataaaagtaaccatttaaaattgtacaatgcaatggcgtaagtacatttacagtgttgtgtaaccaccacctctctatctaattccaaactattttcatctccccaaaagaaatctctgtacgcaataaagcaattactctctaccctcccttccccctatcccccggaaattgccaattggctttttgtttctgtggatttacctattctgggtgttttatgaaaggtcacatattatatatgaattcattgtttatgatctttattataaacaccaagtaaaagtatgacaccttggaaaatgaaattaactcacagcttttgtaatcaccagaggcttgttttcatgagaatttattaaatctgataaaactggtgttcctttgcttattgctaaatacctacagttgacaagcatttcctagggtgcaatcagaaagtgtaactgaaataaactagtatgattaattttgcagtatccatgtaatgtatttaacacttaaacaggacttaccataacccagtaatattctaagttccttacaaacattaattctcttgactttgatttctaccctatgagataggtctagtgttttctattttacagataaggaatttaaggcataaagatttacacagagattatgtggaaaatccggtaagtttggctccaaatctatcttcttcagataatctgcattattgctctcatttattgactaactactgtgtaaaaggactatctatcaccaaccattgccatgggatttacagggcctcttaggggagcagtatatgtctttggcccattgacttggcttagcctcataacatactttggtcaatttaatgaaaagatatgatgcattccagttctgagcagaagctttaagaatcttatgtgtttccaccagttgtctatttttctggcacaaaatgacatgtcctagatgaggaatgatctttcagtctaaggcccataatgaaagacacttggagaagaaaaactctacagccccgaaaacactatgtgaaaaataaataacctattattttcatccactaccgtttatgaacttgttgttctcacttagctgaagatgaccattactgttcttaatcactgggctacatattttttcaaatatcttgttcgtttcttaaaggtcaaagttatatctaagacactgaatgttttagtgccacaccatcatgacaccatttcttcttgaaagcagacattgttttgttaattccaactttcattttaaaatgtacacagtttttcagagtccattggacaactgagtatcttctaattattttaataagaatccctcgtataaaattaagtctactttcaaaacttcagtgtgtctaaaatttaatgattttatatttattcttagattgtacaaagaacttaaggggctgactcatttaattcttatgaaatgattttaataacagaattcaaataataaagcaaaattttccatttttttcttatttatggcatacataaatatctacattttctatataattaatccatattatttcttttttctgttcttccttattcttttcataaatttttctttaacatttattcaacaatgacaatcactacagaatactttttaggacttaggacagggcctgtcacattgtaagaatgtaataaaggtataaagaatcaattactgaatgcttcattaaataaatgaatacatggtatgaaagttgtcaaaatcaaaagtcatttctgtttaaaaaaaaaaaaagaaacaagctaacaaaaaagacaaatagagccagggaaggccaaaatagaagagttcttacgcataaatgcctgataacaaaaactaccacaaaagactctgcaaagacaagcttgcacaaaggccatcgcaaacttacatcaaaaatatgtctgcgaaaacacgtgcccagccactgcctgtgcaccctcagactggcatcaccgttgttgttaagccttatagcaaagaataattatctcaaaatgatggcataatcatcctcatttttaaaaagtcttttttacctccttgaatatgcgtatcgtttactatgatactcatattccctttacaatgccttagttttgaataaatatgattttgttttagagagcctctctctgtttgttatttaggtttacaatacatgtaacatttataaaactgagtaggcatgaaggatgatttatagtaaaataaaaaacacggtatgtgctcctatctccttttttaaaacacagaatacttattctctaggcagtttctctctgttttcttcaggatttgtttgcttcaatctcttatagttttgtttttttcattctctcattcaaaaaaatgggtcaaaatggttcacttcacccctcttcaatttcttcacacttctgtgttctaatctgtttctactcacaacaattctgacatcaaatgtgtaggagattttcctataccaactaattctccaactctccgcacatcaactgggcgctctgttattccgttcaattctgacactagccacctgaaatgagtgcagaccccacaggttaaagactcagtccccccacttcagatgccaatccaaaatcctaagcctctcatacttctggctgattggctacaaattgaagcttcccatgacgtcctcttcaggtttaataatttacaaaaacagccaacatgataagcaatagctataaaactttactttctattactagtttataaaggataaaaattattaccagtttattacaaatgatacaaatgaacaaccagatgaggaggtacatagaatgaggtctgaaaagatccctagcacagaagtttctgtctccatggaattggagtaggccactcttgtggcacatggatttacgtgccaacacagaggtcttctaaaccccactctttagaaatttatatgaaggttccattgtgtaggcatgattaattatattattgactgttggtgattaaactcaatcttcagctccctctttcctccccggaggtccaggggtggaactgaaagttccatcccttacattataagcctctttcatgactagtctctatcctgcaggtatccagaagccctgccatccaagagtcattcattaggataccaaagccaatcctatgactcagaaaattccaagtgtcttagaagccttatatcagaaaccaaggacaaagaacaaatattacaacaaaagatgcttctctcattccaatcactcatgaaattatatagcttcccggagctctatgctatgaacctggtaatgaagaccaaatatatatttcttatcacagtatcacagatttgcacggggacccattttcattgtctcttaattaaataatcaagtacaacatttcttaacattttcattttcctgaaaaaaatgtaatcattattatttaaaaatttcctcactgattatgtatgtttattaaatacccactacaggccaagcagggtgcttggttagtctcaaaagtatgtttctaaaaaattatccagattgctacattgccattttcttgaaggtttctaattcccatgatttctgtaaattacacttgatgatccactaatgtatgttcatcgggcttttatcaaggtttgagctccccatcgcctctaaaaactcatcagaaggaacagttttaaaaacgaaaataaattgcttatttcaaatttaagaactgaataagaattccaaaatcaatgaacgcacaagtcactaaccagaaatataattacaatcattttttaaatcaagaccatataaaatatttgatttggggaattagaaggataatgccttgaaggaatacctgagttgaagaacaatgttttttaacattttttatatgttgcacctagatcaatgtcaggtacaatattgttgaaatgcctgagatgaataataactacacctgacatctgcaattggtatgggaacctattaaaattctttctttcatcctggctaaaatggtgaaatcccatctctactgaaaaatacaaaaaattaaccgggcgcagtggcgggtgtctgtagtcccagctactcgggaggctgaggccggagaatggcttgaacccgggaggcggcgcttgcagtgagccgagatcgcaccactgcacgccagcctgggcactcaaaaaaaaatttaactgtatatatttatatattcaatggcaactgtagttttcattaaaacttttttaatgaattttaatgaaataatattactttattaaatcttttctactcattaatacattttcctaaccatccattttgtgaaagaacaaaatacatttctataatattaggtgacttaaacattattttatgcagctattataactctctctgagttgctaacttatattaccttggcaaatgcattgttcttataaagtttgaaaaattaaagaacaaaaccttagaagagctgtaatggtggcttctctctgagaactaaaaaaatgattgcatgctagacatggtctctcgatttggtatgtttcctgcataccttctcatgtactttcttgttagaaaaatctatagtagaagagttgacacctgagctaggggaggtgcccaaacactgatgggacttccatcccagccagagtcaaggctcttgacaacttggaataaggaattcaaggaaccagtcagaaaacagtgaaagtaagacaatttgttgcaaagccaaagtacgcactcaagaaaggggagtgcaggcatactcaagaaagtgagtagagcccagtggggtttggagcttctatttttatgagtttctttcaccaaggggtggaatattcatgaagattttcatacagatttttggaaaaaggagaaaatttctgagaactgtggtgccaaccatttttaaaccaaatacgaatgttcctggaactgtcatggcactggtgggcgtattatttagtatgttaatgagcacatgatgaggtcctaggtgaaacttaggtcacatccagcaccatattgggtccagtcagttagccagcttggcccacatactggtttttgccgtcttaccgtcttagcagtccctagcttatgcaactgtttcaacagtttttatttgccagtcatgcaaaactgctgcttggaattttccattatcctgtgaccaccctggattattcctgtctcagagtcattcctttgatactttgctgcagcagagtggaaaaacacatttctgcttcgttaaccaactaatacgtacatattagttggttatacaaaatctaacttcaaacttcaagagaaatggtgtacaaagagtagaaaaggaaaaaaagtctgatttactctctttcttctttatttaccattgtgtttattttctataagaaatacatctatttttcttattaagaacacctgaatttccaggcttcccttttttaaatgataaaatttgttgggtttctccttgttcctacaattatcagcatcctttttctaagtacaagcaagcaagtcattaattattatcaatagtggattacattgagaatcaactggcttccggtatgcaatcaataccagctattatacacaataaaacctataatcagcacacagccattttacagagtaggtcagagattagtatagcagaaatgtgtcaggctacaataatctaagtttgtgaagcataaactatttttataaaaaccaattcagttacagtaacaaagacaaatttaccttatcatattacttaagtgatgattgggatgtctgggagggtgtgtacaaacctctccaccacctccaaagacatcagtgaatcattgaaaatgccccaggttatgtcatggcagcaagaaaactatctgagaaatgtttcatcctcttgctttgtagctctcaccattataaagtaccacttcagactctaagcttcctttttaaagcttattgtctgtcatattttctttcctcagtttgattttacctgcatggtagatttgatttatattgaaaaagatacacaaaattacagagaaccagaagtgtttggatcatgaactgtcttccaggaactccttcttgcttcttgtgaataacaatgataacagaagaatactatagtccagttgtttttgttttgttatattttatgttatctatactatgccacataatgctagtaaataataactccctaattatttacatttattgtactttttctaaaatagagctaaacagctgttttcttcatttatataactatattattgtttaacaattttagttatggaaatcagcaaagtactaactaactcttcattttgacgggggggaggtccataatatgtaaatattaagatattcttagaatgcctctttcataaactataggatgaaaaatcaaagggtcatattctcacagttagaaagaaatatagttataatgtacgcaaaatttgttaaacgtacaagccttcacttcaaaaaaaaaaaaactcagaataaaataaaataaacttgcagttttctttaccttcattaagtgttgatggtgctttgtcctgttgttatttctggtgccatgatcatcagcaccaactttgtggttgatgaatattttattctgtttattctaaaagaatgtaacagcatccatctctctcacattttgagaaatcagttatggtgatatgtagtgagagttttaataactatagttactttctcatccccattcaaaactatcaacctgaaataggatgtttgtgacacctccaagactatagtttaaaggtcaccaatcacttcctcattacaaatcaaatagcttgatcacacattgtttatggacatggtccaaagagtaccagcataggcatcttgctgatctgtgaagacagataatggaaatctggggctgctgaggagacctgacttctgagacatgatattagagaagacatgcagaaaaagagctccagaagtctgtagagaaacttattcacagttctggctagtctttggctggtttataagtgtagatgcacagggtaagactccatgaaaccaggcaaaaaacaaaaactaataaaaaagaacatctatctggaattgtgagctaaataattgttagaacttatgaagagagttaaaaaaaaaatctgtgtgcaaactagccagagagataagtccttcttctacattctggacattgagtaaaattccaaaaacatcacactataaacaaatagatattctagagtttacagtaaaggcaactctagaactgctcaaacatagcttaaaaccaaagtttaaattagcatgctgatcctcaagtaaattaagtgcctgcaagaaccaaactcattagtttcttaagaaacacaataaaatggagatactcaatattagagcattctgaaaatctagaatgtaataaaggttatctagacatgcagtaagtcaggacaatatgcccaataaataataaataagagataaatagggaagcattaaagggatggaaaccattaaaaatcaaccaaatggaagttctgttaacaaaaatacaacacataaaatggaaaatgtattaggtagacttggcagcagatgagacactgtaaaagtaaacttaaaatgactttgaaaatagggttgtcaaaaacattcaataaaaacaagaaaaaaatattgaaaaatagttgaagagagcctcagtgatctgtggaacattttaaagtgttctaacatatgtgtgattggagtgtcatattaagaaaagagagagagaaaaaatagctaaggaatagtagccaacatttttcaaagaatcacaatagaccccagggaacataaacacaaacaaatctatctcaagctaaatgatcatcaaaatgctaaaaactaatgattgtgggaaagatactgaaagaagccaaagaatccaggtcacatgcaggggaaaatcataaaatctatttcataactttttatcagacgcagtggaagtcaaaaaaaggataactgaaaataacatatttaaagttattgggagggagcgggggaaatatcaacctacaattctatacccatcaaaaatagccttaaaaaacaaagctcaggccaggcacggtggctcacgtctgtaatcccagcactttgggaggccgaggcgggcggatcacgaggtcaggagatcgagaccatcctggctaacatggtgaaatcccatctctactaaaaatacaaaaaaaaacagctgggaatggtggtgggcacctgtagtcccagctactcgggaggctgaggcaggagaatggcatgaacccggaaggcggagcttgcagtgagccgagacagcaccactgcactccagcctgggcgacagagtgaaactccatctcaaaaaaaaagaaaaaaaaaagctcaaagaaagatttctaaacaataaatgcatgagagtatttgtcaccaacagacttacactatttaaaaagttataagagaaacttgttgtaaaacattgaaaaaaaaaagttgttgatgataaaaggaagtaataccagatggaaacaccaagaattgcagtgcactggaaatgataagtgttaacaaatacatttttttctcatttaaaaattatgtttaaaataattcacttttttaaaacaaatgagaagtggcttcaggtggctgactacaggcagctggtactcacctcctccacaaagaagagctaatatagctagtagatgatcacacttcaaatagatcatccaagagagaacaggaattcaacagagaagtcacaggaaacacttaaagcaaggaaagagaggggaacgaggcagcctccttggccagccttggctggaaacctggagaggttcctcaatagggggaaaaggtaagtgagagaccccaatggcccacatttccatcacaggctcctgcaatcgtaacctcaggagaaccccttgactcttgtgggccctaagactatgatacagaacacacaaggcattgttggattttttttttatccctaccactgctaatcttgtcatttcacttctagtaactgcaaaaaaatttcctcagcttagttatcaactacattgttagttttgccctagggttccgaagttccatggttcacaactcagaagcattttacattctgctcgatttaaacaaggtatttctctaagttttcacaagaatggtaaggtgaaaaccatagcttcatttcctaaatagctataccatcagccaggaagctctgcagtccataccctgatgcttgtgcatagaatattcctcacctccttggtgaaacagtgagccacacaccttccgacaagtttgtttgtttgtttgtttattttgaggcggagttttactcttgttgcccaggctggagtgcaatggcataatcttggctcactgcaacctcggcctcctgggttgaagcgattctcctgcctcagcctcctgagtagctgggactataggcatgagccaccacgcctggctaatttttgtatttttagcagagatggggtttctccatgttggtcaggctggtctcgaactcccaacctcaggtgatccacccaccttggactcccaaagtgctgggattacaggcgtgagccaccgcgcccagtcccgccgagtttatttttaaggtgacttttgttattttgaagtagcattgtgcaaatgtaaagtgcaacagcagaagatgaacactgctggaatattctgaaatatcaaaatacttacttttttcatccaaagctctgaaccctttaaagaaaagaatagtgctgaagtgtatttatgtattgtttgtgtgttatgggggggggggggtgggaaagagaaaaaatataaaataaaacgtaaattgtacatggatccacagattgcatgattattgtgaacatttaaatactgttaattatatcagattttcattcattcaatactagcaaaagctagtaccagaattaataataataataataataacaacaacagctttgagttgcttactatctgaaatacgttattctacccaccttctatttgctagctcatgccattttcacaactgatgagaaaggtgctattattttttcctactttacaagtgagaaaattgaagcacagtgattgtacctcataggcctaaactcacagtcaagaatagaggatatgttaaaccttcaatggatccagggcagtccattactagatattcaatgaacctaataatatgacatattgccttaccatggaaactgcaaggatttctgaaaataatgatagcatcttcatatttcattgcctctgcattaacttttctctgtgagaaattgtgaatgctctatttctaagtatatagatctagatttatctctttctatatatgtatatgcagacatttgtagatgtatattcatgtcatttgtgttgctacttaaaaaactcagttcttataggtttttatatttgtctaactagtaaacttgaattggaattttatttaaaaaatttagattttttatttgcatctcactaaataatccgtgtcctagcgttactcatcttaaatttaacaacattttatatgttaacttgtagttacaggcatcttggaggacaagtgccccctttgaccttgggcttcgggttttatatgttggctggcctacttctggcgtcttgcatctcttttcccttgactctttctttggggtgggctgcctatatgtgcagtggcctgctagcagttgggaggtgagcatgcgcagtgtttactggagtcgtacacatgctcacttgagttccctttacctgcagaatgac
